(19) United States
(12) Patent Application Publication
(10) Pub. No.: US 2004/0005545 A1
(43) Pub. Date: Jan. 8, 2004

(54) Recombinant parainfluenza virus expression systems and vaccines comprising heterologous antigens derived from metapneumovirus

(76) Inventors: Ronaldus Adrianus Maria Fouchier, Rotterdam (NL); Bernadetta Gerarda Van Den Hoogen, Rotterdam (NL); Albertus Dominicus Marcellinus Erasmus Osterhaus, Bunnik (NL); Aurelia Haller, Redwood City, CA (US); Roderick Tang, San Carlos, CA (US)

Correspondence Address: PENNIE AND EDMONDS, 1155 AVENUE OF THE AMERICAS, NEW YORK, NY, 100362711

(21) Appl. No.: 10/373,567

(22) Filed: Feb. 21, 2003

Related U.S. Application Data
(60) Provisional application No. 60/358,934, filed on Feb. 21, 2002.

(51) Int. Cl. C12Q 1/70; A61K 39/155; C12N 7/00

(52) U.S. Cl. 435/5; 435/235.1; 424/211.1

(57) ABSTRACT

The present invention relates to recombinant bovine parainfluenza virus (bPIV) cDNA or RNA which may be used to express heterologous gene products in appropriate host cell systems and/or to rescue negative strand RNA recombinant viruses that express, package, and/or present the heterologous gene product. In particular, the heterologous gene products include gene product of another species of PIV or from another negative strand RNA virus, including but not limited to, influenza virus, respiratory syncytial virus, human metapneumovirus and avian pneumovirus. The chimeric viruses and expression products may advantageously be used in vaccine formulations including vaccines against a broad range of pathogens and antigens.

[0001] This application claims priority to U.S. Provisional Patent Application No. 60/358,934, filed Feb. 21, 2002, which is incorporated by reference herein in its entirety.

[0002] Copending and co-assigned U.S. patent application Ser. No. ______, filed on even date herewith, listing Ronaldus Fouchier, Bernadetta van den Hoogen, Albertus Osterhaus, Aurelia Haller, and Roderick Tang as Inventors, entitled “METAPNEUMOVIRUS STRAINS AND THEIR USE IN VACCINE FORMULATIONS AND AS VECTORS FOR EXPRESSION OF ANTIGENIC SEQUENCES”, is incorporated herein by reference in its entirety.

### 1. INTRODUCTION

[0003] The present invention relates to recombinant parainfluenza virus (PIV) cDNA or RNA that may be used to express heterologous gene products in appropriate host cell systems and/or to rescue negative strand RNA recombinant viruses that express, package, and/or present the heterologous gene product. In particular, the present invention encompasses vaccine preparations comprising chimeric PIV expressing a heterologous gene product, wherein the heterologous gene product is preferably an antigenic peptide or polypeptide. In one embodiment, the PIV vector of the invention expresses one, two, or three heterologous gene products that may be encoded by the same or different viruses. In a preferred embodiment, the heterologous sequence encodes a heterologous gene product that is an antigenic polypeptide from another species of PIV or from another negative strand RNA virus, including but not limited to, influenza virus, respiratory syncytial virus (RSV), mammalian metapneumovirus, and avian pneumovirus. The vaccine preparations of the invention encompass multivalent vaccines, including bivalent and trivalent vaccine preparations. The multivalent vaccines of the invention may be administered in the form of one PIV vector expressing each heterologous antigenic sequence or two or more PIV vectors each encoding different heterologous antigenic sequences. The vaccine preparations of the invention can be administered alone or in combination with other vaccines, prophylactic agents, or therapeutic agents.

### 2. BACKGROUND OF THE INVENTION

[0004] Parainfluenza viral infection results in serious respiratory tract disease in infants and children. (Tao et al., 1999, Vaccine 17: 1100-08). Infectious parainfluenza viral infections account for approximately 20% of all hospitalizations of pediatric patients that suffer from respiratory tract infections worldwide. Id. An effective antiviral therapy is not available to treat PIV related diseases, and a vaccine to prevent PIV infection has not yet been approved.

[0005] PIV is a member of the genus respirovirus (PIV1, PIV3) or rubulavirus (PIV2, PIV4) of the paramyxoviridae family. PIV is made up of two structural modules: (1) an internal ribonucleoprotein core, or nucleocapsid, containing the viral genome, and (2) an outer, roughly spherical lipoprotein envelope. Its genome consists of a single strand of negative sense RNA, that is approximately 15,456 nucleotides in length and encodes at least eight polypeptides. These proteins include the nucleocapsid structural protein (NP, NC, or N depending on the genera), the phosphoprotein (P), the matrix protein (M), the fusion glycoprotein (F), the hemagglutinin-neuraminidase glycoprotein (HN), the large polymerase protein (L), and the C and D proteins of unknown function. Id.

[0006] The parainfluenza nucleocapsid protein (NP, NC, or N) contains two domains within each protein unit. These domains include: an amino-terminal domain, that comprises nearly two-thirds of the molecule and interacts directly with the RNA, and a carboxyl-terminal domain, that lies on the surface of the assembled nucleocapsid. A hinge is thought to exist at the junction of these two domains, thereby imparting some flexibility on this protein (see Fields et al. (ed.), 1991, FUNDAMENTAL VIROLOGY, 2^{nd} ed, Raven Press, New York, incorporated by reference herein in its entirety). The matrix protein (M) is apparently involved in viral assembly, and it interacts with both the viral membrane and the nucleocapsid proteins. The phosphoprotein (P) is subject to phosphorylation and has been implicated in transcription regulation, methylation, phosphorylation and polyadenylation. Produced initially as an inactive precursor, the fusion glycoprotein (F) is cleaved upon translation to produce two disulfide linked polypeptides. The active F protein interacts with the viral membrane where it facilitates penetration of the parainfluenza virion into host cells by promoting the fusion of the viral envelope with the host cell plasma membrane. Id. The glycoprotein, hemagglutinin-neuraminidase (HN) protrudes from the envelope and imparts hemagglutinin and neuraminidase activities on the virus. HN has a strongly hydrophobic amino terminus that functions to anchor the HN protein into the lipid bilayer. Id. Finally, the large polymerase protein (L) plays an important role in both transcription and replication. Id.

[0007] Bovine parainfluenza virus was first isolated in 1959 from calves showing signs of shipping fever. It has since been isolated from normal cattle, aborted fetuses, and cattle exhibiting signs of respiratory disease (Breker-Klassen et al., 1996, Can. J. Vet. Res. 60: 228-236. See also Shibuta, 1977, Microbiol. Immunol. 23 (7), 617-628). Human and bovine PIV3 share neutralizing epitopes but show distinct antigenic properties. Significant differences exist between the human and bovine viral strains in the HN protein. In fact, a bovine strain induces some neutralizing antibodies to hPIV infection while a human strain seems to induce a wider spectrum of neutralizing antibodies against human PIV3 (Van Wyke Coelingh et al., 1990, J. Virol. 64:3833-3843).

[0008] The replication of all negative-strand RNA viruses, including PIV, is complicated by the absence of the cellular machinery that is required to replicate RNA. Additionally, the negative-strand genome must be transcribed into a positive-strand (mRNA) copy before translation can occur. Consequently, the genomic RNA alone cannot synthesize the required RNA-dependent RNA polymerase upon entry into the cell. The L, P and N proteins must enter the host cell along with the genomic RNA.

[0009] It is hypothesized that most or all of the viral proteins that transcribe PIV mRNA also carry out the replication of the genome. The mechanism that regulates the alternative uses (i.e., transcription or replication) of the same complement of proteins has not been clearly identified, but the process appears to involve the abundance of free forms of one or more of the nucleocapsid proteins. Directly following penetration of the virus, transcription is initiated by the L protein using the negative-sense RNA in the nucleocapsid as a template. Viral RNA synthesis is regulated such that it produces monocistronic mRNAs during transcription.

[0010] Following transcription, virus genome replication is the second essential event in infection by negative-strand RNA viruses. As with other negative-strand RNA viruses, virus genome replication in PIV is mediated by virus-specified proteins. The first products of replicative RNA synthesis are complementary copies (i.e., plus-polarity) of the PIV genomic RNA (cRNA). These plus-stranded copies (anti-genomes) differ from the plus-stranded mRNA transcripts in the structure of their termini. Unlike the mRNA transcripts, the anti-genomic cRNAs are not capped or methylated at the 5′ termini, and they are not truncated nor polyadenylated at the 3′ termini. The cRNAs are coterminal with their negative strand templates and contain all the genetic information in the complementary form. The cRNAs serve as templates for the synthesis of PIV negative-strand viral genomes (vRNAs).

[0011] The bPIV negative strand genomes (vRNAs) and antigenomes (cRNAs) are encapsidated by nucleocapsid proteins; the only unencapsidated RNA species are viral mRNAs. Replication and transcription of bPIV RNA occurs in the cytoplasm of the host cell. Assembly of the viral components appears to take place at the host cell plasma membrane where the mature virus is released by budding.

[0012] 2.1. Paramyxovirus

[0013] Classically, as devastating agents of disease, paramyxoviruses account for many animal and human deaths worldwide each year. The Paramyxoviridae form a family within the order of Mononegavirales (negative-sense single stranded RNA viruses), consisting of the sub-families Paramyxovirinae and Pneumovirinae. The latter sub-family is at present taxonomically divided in the genera Pneumovirus and Metapneumovirus (Pringle, 1999, Arch. Virol. 144/2, 2065-2070). Human respiratory syncytial virus (hRSV), a species of the Pneumovirus genus, is the single most important cause of lower respiratory tract infections during infancy and early childhood worldwide (Domachowske, & Rosenberg, 1999, Clin. Microbio. Rev. 12(2): 298-309). Other members of the Pneumovirus genus include the bovine and ovine respiratory syncytial viruses and pneumonia virus of mice (PVM).

[0014] In the past decades several etiological agents of mammalian disease, in particular of respiratory tract illnesses (RTI), in particular of humans, have been identified (Evans, In: Viral Infections of Humans, Epidemiology and Control. 3th ed. (ed. Evans, A. S) 22-28 (Plenum Publishing Corporation, New York, 1989)). Classical etiological agents of RTI with mammals are respiratory syncytial viruses belonging to the genus Pneumovirus found with humans (hRSV) and ruminants such as cattle or sheep (bRSV and/or oRSV). In human RSV differences in reciprocal cross neutralization assays, reactivity of the G proteins in immunological assays and nucleotide sequences of the G gene are used to define two hRSV antigenic subgroups. Within the subgroups the amino acid sequences show 94% (subgroup A) or 98% (subgroup B) identity, while only 53% amino acid sequence identity is found between the subgroups. Additional variability is observed within subgroups based on monoclonal antibodies, RT-PCR assays and RNAse protection assays. Viruses from both subgroups have a worldwide distribution and may occur during a single season. Infection may occur in the presence of pre-existing immunity and the antigenic variation is not strictly required to allow re-infection. See, for example Sullender, 2000, Clinical Microbiology Reviews 13(1): 1-15; Collins et al. Fields Virology, ed. B. N. Knipe, Howley, P. M. 1996, Philadelphia: Lippencott-Raven. 1313-1351; Johnson et al., 1987, (Proc Natl Acad Sci USA, 84(16): 5625-9; Collins, in The Paramyxoviruses, D. W. Kingsbury, Editor. 1991, Plenum Press: New York. p. 103-153.

[0015] Another classical Pneumovirus is the pneumonia virus of mice (PVM), in general only found with laboratory mice. However, a proportion of the illnesses observed among mammals can still not be attributed to known pathogens.

[0016] 2.2. RSV Infections

[0017] Respiratory syncytial virus (RSV) is the leading cause of serious lower respiratory tract disease in infants and children (Feigen et al., eds., 1987, In: Textbook of Pediatric Infectious Diseases, W B Saunders, Philadelphia at pages 1653-1675; New Vaccine Development, Establishing Priorities, Vol. 1, 1985, National Academy Press, Washington D.C. at pages 397-409; and Ruuskanen et al., 1993, Curr. Probl. Pediatr. 23:50-79). The yearly epidemic nature of RSV infection is evident worldwide, but the incidence and severity of RSV disease in a given season vary by region (Hall, 1993, Contemp. Pediatr. 10:92-110). In temperate regions of the northern hemisphere, it usually begins in late fall and ends in late spring. Primary RSV infection occurs most often in children from 6 weeks to 2 years of age and uncommonly in the first 4 weeks of life during nosocomial epidemics (Hall et al., 1979, New Engl. J. Med. 300:393-396). Children at increased risk for RSV infection include, but are not limited to, preterm infants (Hall et al., 1979, New Engl. J. Med. 300:393-396) and children with bronchopulmonary dysplasia (Groothuis et al., 1988, Pediatrics 82:199-203), congenital heart disease (MacDonald et al., New Engl. J. Med. 307:397-400), congenital or acquired immunodeficiency (Ogra et al., 1988, Pediatr. Infect. Dis. J. 7:246-249; and Pohl et al., 1992, J. Infect. Dis. 165:166-169), and cystic fibrosis (Abman et al., 1988, J. Pediatr. 113:826-830). The fatality rate in infants with heart or lung disease who are hospitalized with RSV infection is 3%-4% (Navas et al., 1992, J. Pediatr. 121:348-354).

[0018] RSV infects adults as well as infants and children. In healthy adults, RSV causes predominantly upper respiratory tract disease. It has recently become evident that some adults, especially the elderly, have symptomatic RSV infections more frequently than had been previously reported (Evans, A. S., eds., 1989, Viral Infections of Humans. Epidemiology and Control, 3rd ed., Plenum Medical Book, New York at pages 525-544). Several epidemics also have been reported among nursing home patients and institutionalized young adults (Falsey, A. R., 1991, Infect. Control Hosp. Epidemiol. 12:602-608; and Garvie et al., 1980, Br. Med. J. 281:1253-1254). Finally, RSV may cause serious disease in immunosuppressed persons, particularly bone marrow transplant patients (Hertz et al., 1989, Medicine 68:269-281).

[0019] Treatment options for established RSV disease are limited. Severe RSV disease of the lower respiratory tract often requires considerable supportive care, including administration of humidified oxygen and respiratory assistance (Fields et al., eds, 1990, Fields Virology, 2nd ed., Vol. 1, Raven Press, New York at pages 1045-1072).

[0020] While a vaccine might prevent RSV infection, and/or RSV-related disease, no vaccine is yet licensed for this indication. A major obstacle to vaccine development is safety. A formalin-inactivated vaccine, though immunogenic, unexpectedly caused a higher and more severe incidence of lower respiratory tract disease due to RSV in immunized infants than in infants immunized with a similarly prepared trivalent parainfluenza vaccine (Kim et al., 1969, Am. J. Epidemiol. 89:422-434; and Kapikian et al., 1969, Am. J. Epidemiol. 89:405-421). Several candidate RSV vaccines have been abandoned and others are under development (Murphy et al., 1994, Virus Res. 32:13-36), but even if safety issues are resolved, vaccine efficacy must also be improved. A number of problems remain to be solved. Immunization would be required in the immediate neonatal period since the peak incidence of lower respiratory tract disease occurs at 2-5 months of age. The immaturity of the neonatal immune response together with high titers of maternally acquired RSV antibody may be expected to reduce vaccine immunogenicity in the neonatal period (Murphy et al., 1988, J. Virol. 62:3907-3910; and Murphy et al., 1991, Vaccine 9:185-189). Finally, primary RSV infection and disease do not protect well against subsequent RSV disease (Henderson et al., 1979, New Engl. J. Med. 300:530-534).

[0021] Currently, the only approved approach to prophylaxis of RSV disease is passive immunization. Initial evidence suggesting a protective role for IgG was obtained from observations involving maternal antibody in ferrets (Prince, G. A., Ph.D. diss., University of California, Los Angeles, 1975) and humans (Lambrecht et al, 1976, J. Infect. Dis. 134:211-217; and Glezen et al., 1981, J. Pediatr. 98:708-715). Hemming et al. (Morell et al., eds., 1986, Clinical Use of Intravenous Immunoglobulins, Academic Press, London at pages 285-294) recognized the possible utility of RSV antibody in treatment or prevention of RSV infection during studies involving the pharmacokinetics of an intravenous immune globulin (IVIG) in newborns suspected of having neonatal sepsis. In this study, it was noted that one infant, whose respiratory secretions yielded RSV, recovered rapidly after IVIG infusion. Subsequent analysis of the IVIG lot revealed an unusually high titer of RSV neutralizing antibody. This same group of investigators then examined the ability of hyperimmune serum or immune globulin, enriched for RSV neutralizing antibody, to protect cotton rats and primates against RSV infection (Prince et al., 1985, Virus Res. 3:193-206;

[0022] Prince et al., 1990, J. Virol. 64:3091-3092; Hemming et al., 1985, J. Infect. Dis. 152:1083-1087; Prince et al., 1983, Infect. Immun. 42:81-87; and Prince et al., 1985, J. Virol. 55:517-520). Results of these studies indicate that IVIG may be used to prevent RSV infection, in addition to treating or preventing RSV-related disorders.

[0023] Recent clinical studies have demonstrated the ability of this passively administered RSV hyperimmune globulin (RSV IVIG) to protect at-risk children from severe lower respiratory infection by RSV (Groothius et al., 1993, New Engl. J. Med. 329:1524-1530; and The PREVENT Study Group, 1997, Pediatrics 99:93-99). While this is a major advance in preventing RSV infection, this treatment poses certain limitations in its widespread use. First, RSV IVIG must be infused intravenously over several hours to achieve an effective dose. Second, the concentrations of active material in hyperimmune globulins are insufficient to treat adults at risk or most children with comprised cardiopulmonary function. Third, intravenous infusion necessitates monthly hospital visits during the RSV season. Finally, it may prove difficult to select sufficient donors to produce a hyperimmune globulin for RSV to meet the demand for this product. Currently, only approximately 8% of normal donors have RSV neutralizing antibody titers high enough to qualify for the production of hyperimmune globulin.

[0024] One way to improve the specific activity of the immunoglobulin would be to develop one or more highly potent RSV neutralizing monoclonal antibodies (MAbs). Such MAbs should be human or humanized in order to retain favorable pharmacokinetics and to avoid generating a human anti-mouse antibody response, as repeat dosing would be required throughout the RSV season. Two glycoproteins, F and G, on the surface of RSV have been shown to be targets of neutralizing antibodies (Fields et al., 1990, supra; and Murphy et al., 1994, supra).

[0025] A humanized antibody directed to an epitope in the A antigenic site of the F protein of RSV, SYNAGIS®, is approved for intramuscular administration to pediatric patients for prevention of serious lower respiratory tract disease caused by RSV at recommended monthly doses of 15 mg/kg of body weight throughout the RSV season (November through April in the northern hemisphere). SYNAGIS® is a composite of human (95%) and murine (5%) antibody sequences. See, Johnson et al., 1997, J. Infect. Diseases 176:1215-1224 and U.S. Pat. No. 5,824,307, the entire contents of which are incorporated herein by reference. The human heavy chain sequence was derived from the constant domains of human IgG1 and the variable framework regions of the VH genes of Cor (Press et al., 1970, Biochem. J. 117:641-660) and Cess (Takashi et al., 1984, Proc. Natl. Acad. Sci. USA 81:194-198). The human light chain sequence was derived from the constant domain of C and the variable framework regions of the VL gene K104 with J-4 (Bentley et al., 1980, Nature 288:5194-5198). The murine sequences derived from a murine monoclonal antibody, Mab 1129 (Beeler et al., 1989, J. Virology 63:2941-2950), in a process which involved the grafting of the murine complementarity determining regions into the human antibody frameworks.

[0026] 2.3. Avian Pneumoviruses

[0027] Respiratory disease caused by an avian pneumovirus (APV) was first described in South Africa in the late 1970s (Buys et al., 1980, Turkey 28:36-46) where it had a devastating effect on the turkey industry. The disease in turkeys was characterized by sinusitis and rhinitis and was called turkey rhinotracheitis (TRT). The European isolates of APV have also been strongly implicated as factors in swollen head syndrome (SHS) in chickens (O'Brien, 1985, Vet. Rec. 117:619-620). Originally, the disease appeared in broiler chicken flocks infected with Newcastle disease virus (NDV) and was assumed to be a secondary problem associated with Newcastle disease (ND). Antibody against European APV was detected in affected chickens after the onset of SHS (Cook et al., 1988, Avian Pathol. 17:403-410), thus implicating APV as the cause.

[0028] Avian pneumovirus (APV) also known as turkey rhinotracheitis virus (TRTV), the aetiological agent of avian rhinotracheitis, an upper respiratory tract infection of turkeys (Giraud et al., 1986, Vet. Res. 119:606-607), is the sole member of the recently assigned Metapneumovirus genus, which, as said was until now not associated with infections, or what is more, with disease of mammals. Serological subgroups of APV can be differentiated on the basis of nucleotide or amino acid sequences of the G glycoprotein and neutralization tests using monoclonal antibodies that also recognize the G glycoprotein. However, other differences in the nucleotide and amino acid sequences can be used to distinguish serological subgroups of APV. Within subgroups A, B and D, the G protein shows 98.5 to 99.7% aa sequence identity within subgroups while between the subgroups only 31.2-38% aa identity is observed. See for example Collins et al., 1993, Avian Pathology, 22: p. 469-479; Cook et al., 1993, Avian Pathology, 22: 257-273; Bayon-Auboyer et al., J Gen Virol, 81(Pt 11): 2723-33; Seal, 1998, Virus Res, 58(1-2): 45-52; Bayon-Auboyer et al., 1999, Arch Virol, 144(6): 91-109; Juhasz, et al., 1994, J Gen Virol, 75(Pt 11): 2873-80.

[0029] A further serotype of APV is provided in WO00/20600, incorporated by reference herein, which describes the Colorado isolate of APV and compared it to known APV or TRT strains with in vitro serum neutralization tests. First, the Colorado isolate was tested against monospecific polyclonal antisera to recognized TRT isolates. The Colorado isolate was not neutralized by monospecific antisera to any of the TRT strains. It was, however, neutralized by a hyperimmune antiserum raised against a subgroup A strain. This antiserum neutralized the homologous virus to a titre of 1:400 and the Colorado isolate to a titer of 1:80. Using the above method, the Colorado isolate was then tested against TRT monoclonal antibodies. In each case, the reciprocal neutralization titer was <10. Monospecific antiserum raised to the Colorado isolate was also tested against TRT strains of both subgroups. None of the TRT strains tested were neutralized by the antiserum to the Colorado isolate.

[0030] The Colorado strain of APV does not protect SPF chicks against challenge with either a subgroup A or a subgroup B strain of TRT virus. These results suggest that the Colorado isolate may be the first example of a further serotype of avian pneumovirus (See, Bayon-Auboyer et al., 2000, J. Gen. Vir. 81:2723-2733).

[0031] The avian pneumovirus is a single stranded, non-segmented RNA virus that belongs to the sub-family Pneumovirinae of the family Paramyxoviridae, genus metapneumovirus (Cavanagh and Barrett, 1988, Virus Res. 11:241-256; Ling et al., 1992, J. Gen. Virol. 73:1709-1715; Yu et al., 1992, J. Gen. Virol. 73:1355-1363). The Paramyxoviridae family is divided into two sub-families: the Paramyxovirinae and Pneumovirinae. The subfamily Paramyxovirinae includes, but is not limited to, the genera: Paramyxovirus, Rubulavirus, and Morbillivirus. Recently, the sub-family Pneumovirinae was divided into two genera based on gene order, and sequence homology, i.e. pneumovirus and metapneumovirus (Naylor et al., 1998, J. Gen. Virol., 79:1393-1398; Pringle, 1998, Arch. Virol. 143:1449-1159). The pneumovirus genus includes, but is not limited to, human respiratory syncytial virus (hRSV), bovine respiratory syncytial virus (bRSV), ovine respiratory syncytial virus, and mouse pneumovirus. The metapneumovirus genus includes, but is not limited to, European avian pneumovirus (subgroups A and B), which is distinguished from hRSV, the type species for the genus pneumovirus (Naylor et al., 1998, J. Gen. Virol., 79:1393-1398; Pringle, 1998, Arch. Virol. 143:1449-1159). The US isolate of APV represents a third subgroup (subgroup C) within metapneumovirus genus because it has been found to be antigenically and genetically different from European isolates (Seal, 1998, Virus Res. 58:45-52; Senne et al., 1998, In: Proc. 47th WPDC, California, pp. 67-68).

[0032] Electron microscopic examination of negatively stained APV reveals pleomorphic, sometimes spherical, virions ranging from 80 to 200 nm in diameter with long filaments ranging from 1000 to 2000 nm in length (Collins and Gough, 1988, J. Gen. Virol. 69:909-916). The envelope is made of a membrane studded with spikes 13 to 15 nm in length. The nucleocapsid is helical, 14 nm in diameter and has 7 nm pitch. The nucleocapsid diameter is smaller than that of the genera Paramyxovirus and Morbillivirus, which usually have diameters of about 18 nm.

[0033] Avian pneumovirus infection is an emerging disease in the USA despite its presence elsewhere in the world in poultry for many years. In May 1996, a highly contagious respiratory disease of turkeys appeared in Colorado, and an APV was subsequently isolated at the National Veterinary Services Laboratory (NVSL) in Ames, Iowa (Senne et al., 1997, Proc. 134th Ann. Mtg., AVMA, pp. 190). Prior to this time, the United States and Canada were considered free of avian pneumovirus (Pearson et al., 1993, In: Newly Emerging and Re-emerging Avian Diseases: Applied Research and Practical Applications for Diagnosis and Control, pp. 78-83; Hecker and Myers, 1993, Vet. Rec. 132:172). Early in 1997, the presence of APV was detected serologically in turkeys in Minnesota. By the time the first confirmed diagnosis was made, APV infections had already spread to many farms. The disease is associated with clinical signs in the upper respiratory tract: foamy eyes, nasal discharge and swelling of the sinuses. It is exacerbated by secondary infections. Morbidity in infected birds can be as high as 100%. The mortality can range from 1 to 90% and is highest in six to twelve week old poults.

[0034] Avian pneumovirus is transmitted by contact. Nasal discharge, movement of affected birds, contaminated water, contaminated equipment; contaminated feed trucks and load-out activities can contribute to the transmission of the virus. Recovered turkeys are thought to be carriers. Because the virus is shown to infect the epithelium of the oviduct of laying turkeys and because APV has been detected in young poults, egg transmission is considered a possibility.

[0035] A significant portion of human respiratory disease is caused by members of the viral sub-families Paramyxovirinae and Pneumovirinae, there still remains a need for an effective vaccine to confer protection against a variety of viruses that result in respiratory tract infection.

[0036] Citation or discussion of a reference herein shall not be construed as an admission that such is prior art to the present invention.

### 3. SUMMARY OF THE INVENTION

[0037] The present invention relates to recombinant parainfluenza virus cDNA and RNA that may be engineered to express heterologous or non-native gene products, in particular, to express antigenic polypeptides and peptides. In one embodiment, the present invention relates to recombinant bovine or human parainfluenza viruses which are engineered to express heterologous antigens or immunogenic and/or antigenic fragments of heterologous antigens. In another embodiment of the invention, the recombinant bovine or human parainfluenza viruses are engineered to express sequences that are non-native to the PIV genome, including mutated PIV nucleotide sequences. In particular, the invention relates to recombinant Kansas-strain bovine parainfluenza type 3 virus as well as cDNA and RNA molecules coding for the same. The present invention also relates to recombinant PIV that contain modifications that result in chimeric viruses with phenotypes more suitable for use in vaccine formulations.

[0038] The present invention provides for the first time a chimeric PIV formulated as a vaccine that is able to confer protection against various viral infections, in particular, viruses that result in respiratory tract infections. In a specific embodiment, the present invention provides a vaccine that is able to confer protection against parainfluenza, influenza, or respiratory syncytial viral infection. The present invention provides for the first time a vaccine that is able to confer protection against metapneumovirus infection in a mammalian host.

[0039] In accordance with the present invention, a recombinant virus is one derived from a bovine parainfluenza virus or a human parainfluenza virus that is encoded by endogenous or native genomic sequences or non-native genomic sequences. In accordance with the invention, a non-native sequence is one that is different from the native or endogenous genomic sequence due to one or more mutations, including, but not limited to, point mutations, rearrangements, insertions, deletions, etc. to the genomic sequence that may or may not result in a phenotypic change.

[0040] In accordance with the present invention, a chimeric virus of the invention is a recombinant bPIV or hPIV which further comprises one or more heterologous nucleotide sequences. In accordance with the invention, a chimeric virus may be encoded by a nucleotide sequence in which heterologous nucleotide sequences have been added to the genome or in which nucleotide sequences have been replaced with heterologous nucleotide sequences.

[0041] The present invention also relates to engineered recombinant parainfluenza viruses and viral vectors that encode combinations of heterologous sequences which encode gene products, including but not limited to, genes from different strains of PIV, influenza virus, respiratory syncytial virus, mammalian metapneumovirus (e.g., human metapneumovirus), avian pneumovirus, measles, mumps, other viruses, pathogens, cellular genes, tumor antigens, or combinations thereof. Furthermore, the invention relates to engineered recombinant parainfluenza viruses that contain a nucleotide sequence derived from a metapneumovirus in combination with a nucleotide sequence derived from a respiratory syncytial virus, and further in combination with a nucleotide sequence derived from a human parainfluenza virus. The invention also encompasses recombinant parainfluenza vectors and viruses that are engineered to encode genes from different species and strains of the parainfluenza virus, including the F and HN genes of human PIV3.

[0042] In one embodiment, the PIV vector of the invention is engineered to express one or more heterologous sequences, wherein the heterologous sequences encode gene products that are preferably antigenic gene products. In a preferred embodiment, the PIV vector of the invention expresses one, two or three heterologous sequences that encode antigenic polypeptides and peptides. In some embodiments, the heterologous sequences are derived from the same virus or from different viruses. In a preferred embodiment, the heterologous sequences encode heterologous gene products that are antigenic polypeptides from another species of PIV, such as a human PIV, a mutant strain of PIV, or from another negative strand RNA virus, including but not limited to, influenza virus, respiratory syncytial virus (RSV), mammalian metapneumovirus (e.g., human metapneumovirus (hMPV)), and avian pneumovirus. In one embodiment, the heterologous sequence encodes an immunogenic and/or antigenic fragment of a heterologous gene product.

[0043] In a preferred embodiment, the recombinant PIV is a bovine PIV type 3, or an attenuated human PIV type 3. In one embodiment, the sequences encoding fusion (F) protein, hemagglutinin (HN) glycoprotein, or other non-essential genes of the PIV genome are deleted and are substituted by heterologous antigenic sequences. In yet another embodiment, the PIV genome contains mutations or modifications, in addition to the heterologous nucleotide sequences, that result in a chimeric virus having a phenotype that is more suitable for use in vaccine formulations, e.g., an attenuated phenotype or a phenotype with enhanced antigenicity.

[0044] In a specific embodiment, the heterologous nucleotide sequence to be inserted into the PIV genome is derived from the nucleotide sequences encoding a F protein, a G protein or an HN protein. In certain embodiments, the nucleotide sequence to be inserted encodes a chimeric F protein, a chimeric G protein or a chimeric HN protein. In a specific embodiment, the F protein comprises an ectodomain of a F protein of a metapneumovirus, a transmembrane domain of a F protein of a parainfluenza virus, and a luminal domain of a F protein of a parainfluenza virus. In certain embodiments, the nucleotide sequence to be inserted encodes a F protein, wherein the transmembrane domain of the F protein is deleted so that a soluble F protein is expressed.

[0045] In another specific embodiment, the invention provides a chimeric virus comprising a PIV genome comprising a heterologous nucleotide sequence derived from a metapneumovirus. In a specific embodiment, the PIV virus is a Kansas-strain bovine parainfluenza type 3 virus. In other embodiments, the PIV virus is a human parainfluenza virus with an attenuated phenotype. In yet other embodiments, the invention provides a chimeric bovine parainfluenza virus type 3/human parainfluenza virus engineered to contain human parainfluenza F and HN genes in a bovine parainfluenza backbone. The chimeric virus may further comprise a heterologous nucleotide sequence derived from a metapneumovirus, and/or further comprise a heterologous nucleotide sequence derived from a respiratory syncytial virus.

[0046] In certain embodiments, the virus of the invention comprises heterologous nucleotide sequences derived from at least two different genes of a metapneumovirus. In a specific embodiment, the heterologous sequence is derived from a metapneumovirus, e.g., avian pneumovirus and human metapneumovirus. More specifically, the heterologous sequence is derived from an avian pneumovirus, including avian pneumovirus type A, B, C or D, preferably C.

[0047] The present invention also provides vaccine preparations and immunogenic compositions comprising chimeric PIV expressing one or more heterologous antigenic sequences. In a specific embodiment, the present invention provides multivalent vaccines, including bivalent and trivalent vaccines. The multivalent vaccines of the invention may be administered in the form of one PIV vector expressing each heterologous antigenic sequence or two or more PIV vectors each encoding different heterologous antigenic sequences. In one embodiment, the vaccine preparation of the invention comprises chimeric PIV expressing one, two or three heterologous polypeptides, wherein the heterologous polypeptides can be encoded by sequences derived from one strain of the same virus, different strains of the same virus, or different viruses. Preferably, the heterologous antigenic sequences are derived from a negative strand RNA virus, including but not limited to, influenza virus, parainfluenza virus, respiratory syncytial virus (RSV), mammalian metapneumovirus (e.g., human metapneumovirus (hMPV)), and avian pneumovirus (APV). The heterologous antigenic sequences include, but are not limited to, sequences that encode human parainfluenza virus F or HN protein, F protein of RSV, HA protein of influenza virus type A, B, and C, and F protein of human MPV and avian pneumovirus. More preferably, the vaccine preparation of the invention comprises attenuated chimeric viruses that are viable and infectious. In a preferred embodiment, the recombinant PIV is a bovine PIV type 3, or an attenuated strain of human PIV.

[0048] In one embodiment, the vaccine preparation comprises the chimeric virus of the present invention, wherein the F, HN, or some other nonessential genes of the PIV genome have been substituted or deleted. In a preferred embodiment, the vaccine preparation of the present invention is prepared by engineering a strain of PIV with an attenuated phenotype in an intended host. In another preferred embodiment, the vaccine preparation of the present invention is prepared by engineering an attenuated strain of PIV.

[0049] In another embodiment, the heterologous nucleotide sequence is added to the complete PIV genome. In certain embodiments, the PIV genome is engineered so that the heterologous sequences are inserted at position one, two, three, four, five or six, so that the heterologous sequences are expressed as the first, second, third, fourth, fifth, or sixth gene of the viral genome. In specific embodiments, the heterologous sequence is inserted at position one, two, or three of the viral genome. In certain embodiments, the intergenic region between the end of the coding sequence of an inserted heterologous gene and the start of the coding sequence of the downstream gene is altered to a desirable length, resulting in enhanced expression of the heterologous sequence or enhanced growth of the chimeric virus. Alternatively, the intergenic region is altered to a desirable length, with a potential to alter the expression of the heterologous sequence or growth of the recombinant or chimeric virus, e.g., attenuated phenotype. In some embodiments, both the position of the insertion and the length of the intergenic region flanking a heterologous nucleotide sequence are engineered to select a recombinant or chimeric virus with desirable levels of expression of the heterologous sequence and desirable viral growth characteristics.

[0050] In certain embodiments, the invention provides a vaccine formulation comprising the recombinant or chimeric virus of the invention and a pharmaceutically acceptable excipient. In specific embodiments, the vaccine formulation of the invention is used to modulate the immune response of a subject, such as a human, a primate, a horse, a cow, a sheep, a pig, a goat, a dog, a cat, a rodent or a subject of avian species. In a more specific embodiment, the vaccine is used to modulate the immune response of a human infant or a child. In another embodiment, the present invention relates to vaccine formulations for veterinary uses. The vaccine preparation of the invention can be administered alone or in combination with other vaccines or other prophylactic or therapeutic agents.

3.1. CONVENTIONS AND ABBREVIATIONS

| | |
|---|---|
| cDNA | complementary DNA |
| CPE | cytopathic effects |
| L | large protein |
| M | matrix protein (lines inside of envelope) |
| F | fusion glycoprotein |
| HN | hemagglutinin-neuraminidase glycoprotein |
| N, NP or NC | nucleoprotein (associated with RNA and required for |
| | polymerase activity) |
| P | phosphoprotein |
| MOI | multiplicity of infection |
| NA | neuraminidase (envelope glycoprotein) |
| PIV | parainfluenza virus |
| bPIV | bovine parainfluenza virus |
| bPIV3 | bovine parainfluenza virus type 3 |
| hPIV | human parainfluenza virus |
| hPIV3 | human parainfluenza virus type 3 |
| bPIV/hPIV | recombinant bPIV with hPIV sequences |
| or b/h PIV | |
| b/h PIV3 or | recombinant bPIV type 3 with hPIV type 3 sequences |
| bPIV3/hPIV3 | |
| nt | nucleotide |
| RNP | ribonucleoprotein |
| rRNP | recombinant RNP |
| vRNA | genomic virus RNA |
| cRNA | antigenomic virus RNA |
| hMPV | human metapneumovirus |
| APV | avian pneumovirus |
| position | when position is used regarding engineering any virus, |
| | it refers to the position of the gene of the viral genome |
| | to be transcribed. For example, if a gene is located at |
| | position one, it is the first gene of the viral genome to |
| | be transcribe; if a gene is located at position two, it is |
| | the second gene of the viral genome to be transcribed. |
| position 1 of | nucleotide position 104 of the genome, or alternatively, |
| bPIV3, b/h | the position of the first gene of the viral genome to be |
| PIV3 and | transcribed |
| derivatives | |
| thereof | |
| position 2 of | nucleotide position 1774 of the genome, or alternatively |
| bPIV3, b/h | the position between the first and the second open |
| PIV3 and | reading frame of the native parainfluenza virus, or |
| derivatives | alternatively, the position of the second gene of the viral |
| thereof | genome to be transcribed |
| position 3 of | nucleotide position 3724 of the genome, or alternatively |
| bPIV3, b/h | the position between the second and the third open |
| PIV3 and | reading frame of the native parainfluenza virus, or |
| derivatives | alternatively, the position of the third gene of the viral |
| thereof | genome to be transcribed. |
| position 4 of | nucleotide position 5042 of the genome, or |
| bPIV3, b/h | alternatively the position between the third and the |
| PIV3 and | fourth open reading frame of the native parainfluenza |
| derivatives | virus, or alternatively, the position of the fourth gene of |
| thereof | the viral genome to be transcribed. |
| position 5 of | nucleotide position 6790 of the genome, or alternatively |
| bPIV3, b/h | the position between the fourth and the fifth open |
| PIV3 and | reading frame of the native parainfluenza virus, or |
| derivatives | alternatively, the position of the fifth gene of the viral |
| thereof | genome to be transcribed. |
| position 6 of | nucleotide position 8631 of the genome, or alternatively |
| bPIV3, b/h | the position between the fifth and the sixth open |
| PIV3 and | reading frame of the native parainfluenza virus, or |
| derivatives | alternatively, the position of the sixth gene of the viral |
| thereof | genome to be transcribed. |

### 4. DESCRIPTION OF FIGURES

[0051] FIG. 1. Pairwise alignments of the amino acid sequence of the F protein of the human metapneumovirus with different F proteins from different avian pneumoviruses. Identical amino acids between the two sequences are indicated by the one-letter-symbol for the amino acid. Conserved amino acid exchanges between the two amino acid sequences are indicated by a “+” sign, and a space indicates a non-conserved amino acid exchange. A) Alignment of the human metapneumoviral F protein with the F protein of an avian pneumovirus isolated from Mallard Duck (85.6% identity in the ectodomain). B) Alignment of the human metapneumoviral F protein with the F protein of an avian pneumovirus isolated from Turkey (subgroup B; 75% identity in the ectodomain).

[0052] FIG. 2. PCR fragments from nt 5255 to nt 6255 derived from three different isolates of the b/h PIV3 chimeric virus were amplified. The resulting 1 kb DNA fragments were digested with enzymes specific for the F gene of human PIV3. These enzymes do not cut in the corresponding fragment of bovine PIV3. The 1% agarose gel shows the undigested fragment (lanes 2,5, and 6) and the SacI or BgIII digested fragments (lanes 4, 6 and lanes 9, 10, and 11, respectively). The sample in lane 10 is undigested, however, upon a repeat of digestion with BgIII, this sample was cut (data not shown). Lanes 1 and 8 show a DNA size marker.

[0053] FIG. 3. PCR fragments from nt 9075 to nt 10469 derived from three different isolates of the b/h PIV3 chimeric virus were amplified. The resulting 1.4 kb DNA fragments were digested with enzymes specific for the L gene of bovine PIV3. These enzymes do not cut in the corresponding fragment of human PIV3. The 1% agarose gel shows the undigested 1.4 kb fragment (lanes 2, 5, and 8). The smaller DNA fragments produced by digestion with BamHI and PvuII are shown in lanes 3, 4, 6, 7, 9, and 10). Lane 1 shows a DNA size marker.

[0054] FIG. 4. Six constructs, including the bPIV3/hPIV3 vector and b/h PIV3 vectored RSV F or G cDNA, are demonstrated. The bovine PIV3 F gene and HN gene are deleted and replaced with human PIV3 F and HN gene respectively. The RSV F or G genes are cloned into either position 1 or position 2. All RSV genes are linked to the bPIV3 N-P intergenic region with the exception of RSV F1*(N-N), which is followed by the shorter bPIV3 N gene stop/N gene start sequences.

[0055] FIG. 5. b/h PIV3 vectored RSV F or G gene displayed a positional effect. (A) is a Western blot analysis of chimeric virus-infected cell lysates. F protein was detected using monoclonal antibodies (MAbs) against the RSV F protein, and G protein was detected using polyclonal antibodies (PAbs) against the RSV G protein. A 50 kDa band representing the F₁ fragment was detected in cells infected with all chimeric viruses as well as wild-type RSV. There was a greater accumulation of a 20 kDa F fragment in infected cell lysates of chimeric viruses compared to wild-type RSV. The experiment was done at MOI of 0.1, except that in lane 1, b/h PIV3 vectored RSV F1*N-N infections were repeated at a higher MOI of 1.0. Both the immature and glycosylated forms of RSV G protein that migrated at approximately 50 kDa and 90 kDa were detected. (B) is a Northern blot analysis, which showed that the mRNA transcription correlated with the result of the protein expression demonstrated in FIG. 5A. Equal amounts of total RNA were separated on 1% agarose gels containing 1% formaldehyde and transferred to nylon membranes. The blots were hybridized with digoxigenin (DIG)-UTP-labeled riboprobes synthesized by in vitro transcription using a DIG RNA labeling kit. (C) is growth curves of chimeric viruses comprising b/h PIV3 vectored RSV F or G protein in Vero cells. Vero cells were grown to 90% confluence and infected at an MOI of 0.01. The infected monolayers were incubated at 37° C. Virus titers for each time point harvest were determined by TCID₅₀ assays, which were performed by inspecting visually for CPE following incubation at 37° C. for 6 days.

[0056] FIG. 6. The b/h PIV3 vectored enhanced green fluorescence protein (eGFP) constructs. The eGFP gene is introduced into the b/h PIV3 vector sequentially between all genes of PIV3 (only position 1, 2, 3, and 4 are shown here). The eGFP gene was linked to the bPIV3 N-P intergenic region. The b/h GFP 1 construct harbors the eGFP gene cassette in the 3′ most proximal position of the b/h PIV3 genome. The b/h GFP 2 construct contains the eGFP gene cassette between the N and P genes. The b/h GFP 3 construct contains the eGFP gene cassette between the P and M gene, and the b/h GFP4 construct contains the eGFP gene between M and F of b/h PIV3.

[0057] FIG. 7. Positional effect of enhanced green fluorescence protein (eGFP) insertions in the b/h PIV3 genome. (A) shows the amount of green cells produced upon infecting Vero cells with b/h PIV3 vectored eGFP 1, 2, and 3 at MOI 0.1 and MOI 0.01 for 20 hours. The green cells were visualized by using a fluorescent microscope. (B) is a Western blot analysis of infected cell lysates. The blots were probed with a GFP MAb as well as a PIV3 PAb. PIV3 antibody was also used to show that the blots had same volume loading. (C) is growth curves of b/h PIV3 vectored GFP constructs (at position 1, 2, and 3) in Vero cells.

[0058] FIG. 8. Constructs of b/h PIV3 vectored RSV F gene with different intergenic regions. The three constructs, RSV F1* N-N, RSV F2 N-P, and RSV F1 N-P are the same as the RSV F* (N-N), RSV F2, and RSV F1 in FIG. 4 respectively. The distance between the N gene start sequence and the N gene translation start codon in RSV F1* N-N is only 10 nucleotides (nts) long. In contrast, this distance is 86 nts long in RSV F2 construct. RSV F1* N-N also uses the N gene start sequence rather than the P gene start sequence as is done in RSV F2 construct.

[0059] FIG. 9. The length and/or nature of the intergenic region downstream of the inserted RSV gene has an effect on virus replication. (A) Western blot analysis of RSV F protein expression in chimeric viruses. Blots were probed with monoclonal antibodies against the RSV F protein. F1 protein levels expressed by RSV F1 construct and measured at 24 and 48 hours post-infection were close to the levels observed for RSV F2 construct, but much higher than those of RSV F1* N-N construct. (B) is multicycle growth curves comparing the kinetics of virus replication of RSV F1, RSV F1 *N-N and RSV F2 constructs in Vero cells at an MOI of 0.1. Virus titers for each time point harvest were determined by plaque assays, which were performed by immunostaining with RSV polyclonal antisera for quantification after 5 days of incubation.

[0060] FIG. 10. Constructs of trivalent b/h PIV3 vectored RSV F and hMPV F. Two virus genomes, each comprising a chimeric b/h PIV3 vector and a first heterologous sequences derived from a metapneumovirus F gene and a second heterologous sequence derived from respiratory syncytial virus F gene, are shown here. Virus with either of the constructs has been amplified in Vero cells. The engineered virus as described can be used as a trivalent vaccine against the parainfluenza virus infection, metapneumovirus infection and the respiratory syncytial virus infection.

[0061] FIG. 11. A construct harboring two RSV F genes. This construct can be used to determine virus growth kinetics, for RSV F protein production, and replication and immunogenicity in hamsters.

[0062] FIG. 12. The chimeric b/h PIV3 vectored hMPV F constructs. The F gene of human metapneumovirus (hMPV) was inserted in position 1 or position 2 of the b/h PIV3 genome. The hMPV F gene cassette harbored the bPIV3 N-P intergenic region.

[0063] FIG. 13. Immunoprecipitation and replication assays of b/h PIV3 vectored hMPV F gene (at position 2). (A) shows the immunoprecipitation of hMPV F protein using guinea pig or human anti-hMPV antiserum. A specific band migrating at approximately 80 kDa was observed in the lysates of b/h PIV3 vectored hMPV F2. This size corresponds to the F precursor protein, F₀. Non-specific bands of different sizes were also observed in the b/h PIV3 and mock control lanes. (B) shows growth curves that were performed to determine the kinetics of virus replication of b/h PIV3/hMPV F2 and compare it to those observed for b/h PIV3 and b/h PIV3/RSV F2 in Vero cells at an MOI of 0.1. (C) is growth curves that were performed to determine the kinetics of virus replication of b/h PIV3/hMPV F1 and compare it to those observed for b/h PIV3/hMPV F2 and b/h PIV3 in Vero cells at an MOI of 0.01.

[0064] FIG. 14. A chimeric b/h PIV3 vectored soluble RSV F gene construct. This construct comprises a single copy of the soluble RSV F gene, a version of the RSV F gene lacking the transmembrane and cytosolic domains. The advantage of this construct would be the inability of the soluble RSV F to be incorporated into the virion genome.

[0065] FIG. 15. Immunostained b/h PIV3/hMPV F1 and b/h PIV3/hMPV F2. (A) the b/h PIV3/hMPV F1 virus were diluted and used to infect subconfluent Vero cells. Infected cells were overlayed with optiMEM media containing gentamycin and incubated at 35° C. for 5 days. Cells were fixed and immunostained with guinea pig anti-hMPV sera. Expression of hMPV F is visualized by specific color development in the presence of the AEC substrate system. (B) the b/h PIV3/hMPV F2 virus were diluted and used to infect Vero cells. Infected cells were overlayed with 1% methyl cellulose in EMEM/L-15 medium (JRH Biosciences; Lenexa, Kans.). Cells were incubated, fixed and then immunostained with anti-hMPV guinea pig sera. The anti-hMPV guinea pig serum is specific for hMPV 001 protein.

[0066] FIG. 16. Virion fractionation of b/h PIV3 vectored RSV genes on sucrose gradients. These series experiments investigate whether the RSV proteins were incorporated into the b/h PIV3 virion. (A) shows control gradient of free RSV F (generated in baculovirus and C-terminally truncated). Majority of free RSV F was present in fractions 3, 4, 5, and 6. (B) shows that the biggest concentration of RSV virions was observed in fractions 10, 11 and 12. The RSV fractions were probed with RSV polyclonal antiserum as well as RSV F MAb. The fractions that contained the greatest amounts of RSV virions also showed the strongest signal for RSV F, suggesting that the RSV F protein co-migrated and associated with RSV virion. The last figure on (B) also shows that the fractions 10, 11 and 12 displayed the highest virus titer by plaque assay. (C) The b/h PIV3 virions may be more pleiomorphic and thus the spread of the peak fractions containing b/h PIV3 virions was more broad. (D) Sucrose gradient fractions of b/h PIV3/RSV F2 were analyzed with both a PIV polyclonal antiserum and an RSV F MAb. The fractions containing most of the virions were fractions 11, 12, 13 and 14, as shown by Western using the PIV3 antiserum. Correspondingly, these were also the fractions that displayed the highest amounts of RSV F protein. Some free RSV F was also present in fractions 5 and 6. Fractions 11, 12, 13 and 14 displayed the peak virus titers. (E) The fractions containing the most virions of b/h PIV3/RSV G2 (9, 10, 11 and 12) also showed the strongest signal for RSV G protein. Again, these were the fractions with the highest virus titers.

### 5. DESCRIPTION OF THE INVENTION

[0067] The present invention relates to recombinant parainfluenza cDNA and RNA constructs, including but not limited to, recombinant bovine and human PIV cDNA and RNA constructs, that may be used to express heterologous or non-native sequences.

[0068] In accordance with the present invention, a recombinant virus is one derived from a bovine parainfluenza virus or a human parainfluenza virus that is encoded by endogenous or native genomic sequences or non-native genomic sequences. In accordance with the invention, a non-native sequence is one that is different from the native or endogenous genomic sequence due to one or more mutations, including, but not limited to, point mutations, rearrangements, insertions, deletions, etc. to the genomic sequence that may or may not result in a phenotypic change.

[0069] In accordance with the present invention, a chimeric virus of the invention is a recombinant bPIV or hPIV which further comprises one or more heterologous nucleotide sequences. In accordance with the invention, a chimeric virus may be encoded by a nucleotide sequence in which heterologous nucleotide sequences have been added to the genome or in which nucleotide sequences have been replaced with heterologous nucleotide sequences. These recombinant and chimeric viruses and expression products may be used as vaccines suitable for administration to humans or animals. For example, the chimeric viruses of the invention may be used in vaccine formulations to confer protection against pneumovirus, respiratory syncytial virus, parainfluenza virus, or influenza virus infection.

[0070] In one embodiment, the invention relates to PIV cDNA and RNA constructs that are derived from human or bovine PIV variants and are engineered to express one, two, or three heterologous sequences, preferably heterologous genes encoding foreign antigens and other products from a variety of pathogens, cellular genes, tumor antigens, and viruses. In particular, the heterologous sequences are derived from morbillivrus or a negative strand RNA virus, including but not limited to, influenza virus, respiratory syncytial virus (RSV), mammalian metapneumovirus (e.g., human metapneumovirus variants A1, A2, B1, and B2), and avian pneumovirus subgroups A, B, C and D. The mammalian MPVs can be a variant A1, A2, B1 or B2 mammalian MPV. However, the mammalian MPVs of the present invention may encompass additional variants of MPV yet to be identified, and are not limited to variants A1, A2, B1, or B2. In another embodiment of the invention, the heterologous sequences are non-native PIV sequences, including mutated PIV sequences. In some embodiments, the heterologous sequences are derived from the same or from different viruses.

[0071] In a specific embodiment, the virus of the invention is a recombinant PIV comprising heterologous nucleotide sequences derived from human metapneumovirus or avian pneumovirus. The heterologous sequences to be inserted into the PIV genome include, but are not limited to, the sequences encoding the F, G and HN genes of human metapneumovirus variants A1, A2, B1 or B2, sequences encoding the F, G and HN genes of avian pneumovirus type A, B, C or D, and immunogenic and/or antigenic fragments thereof.

[0072] In certain embodiments, the heterologous nucleotide sequence is added to the viral genome. In alternative embodiments, the heterologous nucleotide sequence is exchanged for an endogenous nucleotide sequence. The heterologous nucleotide sequence may be added or inserted at various positions of the PIV genome, e.g., at position 1, 2, 3, 4, 5, or 6. In a preferred embodiment, the heterologous nucleotide sequence is added or inserted at position 1. In another preferred embodiment, the heterologous nucleotide sequence is added or inserted at position 2. In even another preferred embodiment, the heterologous nucleotide sequence is added or inserted at position 3. Inserting or adding heterologous nucleotide sequences at the lower-numbered positions of the virus generally results in stronger expression of the heterologous nucleotide sequence compared to insertion at higher-numbered positions. This is due to a transcriptional gradient that occurs across the genome of the virus. However, virus replication efficiency must also be considered. For example, in the b/h PIV3 chimeric virus of the invention, insertion of a heterologous gene at position 1 delays replication kinetics iii vitro and to a lesser degree also in vivo (see section 8, example 3 and FIG. 5 as well as section 26, example 21). Therefore, inserting heterologous nucleotide sequences at lower-numbered positions is the preferred embodiment of the invention if strong expression of the heterologous nucleotide sequence is desired. Most preferably, a heterologous sequence is inserted at position 2 of a b/h PIV3 genome if strong expression of the heterologous sequence is desired. (See section 5.1.2. infra and section 8, example 3).

[0073] In some other embodiments, the recombinant or chimeric PIV genome is engineered such that the intergenic region between the end of the coding sequence of the heterologous gene and the start of the coding sequence of the downstream gene is altered. In yet some other embodiments, the virus of the invention comprises a recombinant or chimeric PIV genome engineered such that the heterologous nucleotide sequence is inserted at a position selected from the group consisting of positions 1, 2, 3, 4, 5, and 6, and the intergenic region between the heterologous nucleotide sequence and the next downstream gene is altered. Appropriate assays may be used to determine the best mode of insertion (i.e., which position to insert, and the length of the intergenic region) to achieve appropriate levels of gene expression and viral growth characteristics. For detail, see Section 5.1.2., infra.

[0074] In certain embodiments, the chimeric virus of the invention contains two different heterologous nucleotide sequences. The different heterologous nucleotide sequences may be inserted at various positions of the PIV genome. In a preferred embodiment, one heterologous nucleotide sequence is inserted at position 1 and another heterologous nucleotide sequence is added or inserted at position 2 or 3. In other embodiments of the invention, additional heterologous nucleotide sequences are inserted at higher-numbered positions of the PIV genome. In accordance with the present invention, the position of the heterologous sequence refers to the order in which the sequences are transcribed from the viral genome, e.g., a heterologous sequence at position 1 is the first gene sequence to be transcribed from the genome.

[0075] In certain embodiments of the invention, the heterologous nucleotide sequence to be inserted into the genome of the virus of the invention is derived from a negative strand RNA virus, including but not limited to, influenza virus, parainfluenza virus, respiratory syncytial virus, mammalian metapneumovirus, and avian pneumovirus. In a specific embodiment of the invention, the heterologous nucleotide sequence is derived from a human metapneumovirus. In another specific embodiment, the heterologous nucleotide sequence is derived from an avian pneumovirus. More specifically, the heterologous nucleotide sequence of the invention encodes a F, G or SH gene or a portion thereof of a human or avian metapneumovirus. In specific embodiments, a heterologous nucleotide sequences can be any one of SEQ ID NO:1 through SEQ ID NO:5, SEQ ID NO:14, and SEQ ID NO:15 (see Table 16). In certain specific embodiments, the nucleotide sequence encodes a protein of any one of SEQ ID NO:6 through SEQ ID NO:13, SEQ ID NO:16, and SEQ ID NO:17 (see Table 16). In certain specific embodiments, the nucleotide sequence encodes a protein of any one of SEQ ID NO: 314 through 389.

[0076] In specific embodiments of the invention, a heterologous nucleotide sequence of the invention is derived from a type A avian pneumovirus. In other specific embodiments of the invention, a heterologous nucleotide sequence of the invention is derived from a type B avian pneumovirus. In even other specific embodiments of the invention, a heterologous nucleotide sequence of the invention is derived from a type C avian pneumovirus. Phylogenetic analyses show that type A and type B are more closely related to each other than they are to type C (Seal, 2000, Animal Health Res. Rev. 1(1):67-72). Type A and type B are found in Europe whereas type C was first isolated in the U.S.

[0077] In another embodiment of the invention, the heterologous nucleotide sequence encodes a chimeric polypeptide, wherein the ectodomain contains antigenic sequences derived from a virus other than the strain of PIV from which the vector backbone is derived, and the trans membrane and luminal domains are derived from PIV sequences. The resulting chimeric virus would impart antigenicity of the negative strand RNA virus of choice and would have an attenuated phenotype.

[0078] In a specific embodiment of the invention, the heterologous nucleotide sequence encodes a chimeric F protein. Particularly, the ectodomain of the chimeric F protein is the ectodomain of a metapneumovirus, so that a human metapneumovirus or avian pneumovirus, and the transmembrane domain as well as the luminal domain are the transmembrane and luminal domains of a parainfluenza virus, such as a human or a bovine parainfluenza virus. While not bound by any theory, insertion of a chimeric F protein may further attenuate the virus in an intended host but retain the antigenicity of the F protein attributed by its ectodomain.

[0079] The chimeric viruses of the invention may be used in vaccine formulations to confer protection against various infections, including but not limited to, pneumovirus infection, respiratory syncytial virus infection, parainfluenza virus infection, influenza virus infection, or a combination thereof. The present invention provides vaccine preparations comprising chimeric PIV expressing one or more heterologous antigenic sequences, including bivalent and trivalent vaccines. The bivalent and trivalent vaccines of the invention may be administered in the form of one PIV vector expressing each heterologous antigenic sequences or two or more PIV vectors each encoding different heterologous antigenic sequences. Preferably, the heterologous antigenic sequences are derived from a negative strand RNA virus, including but not limited to, influenza virus, parainfluenza virus, respiratory syncytial virus (RSV), mammalian metapneumovirus (e.g., human metapneumovirus) and avian pneumovirus. Thus, the chimeric virions of the present invention may be engineered to create, e.g., anti-human influenza vaccine, anti-human parainfluenza vaccine, anti-human RSV vaccine, and anti-human metapneumovirus vaccine. Preferably, the vaccine preparation of the invention comprises attenuated chimeric viruses that are viable and infectious. The vaccine preparation of the invention can be administered alone or in combination with other vaccines or other prophylactic or therapeutic agents.

[0080] The present invention also relates to the use of viral vectors and chimeric viruses to formulate vaccines against a broad range of viruses and/or antigens including tumor antigens. The viral vectors and chimeric viruses of the present invention may be used to modulate a subject's immune system by stimulating a humoral immune response, a cellular immune response or by stimulating tolerance to an antigen. As used herein, a subject refers to a human, a primate, a horse, a cow, a sheep, a pig, a goat, a dog, a cat, a rodent and a member of avian species. When delivering tumor antigens, the invention may be used to treat subjects having disease amenable to immune response mediated rejection, such as non-solid tumors or solid tumors of small size. It is also contemplated that delivery of tumor antigens by the viral vectors and chimeric viruses described herein will be useful for treatment subsequent to removal of large solid tumors. The invention may also be used to treat subjects who are suspected of having cancer.

[0081] The invention may be divided into the following stages solely for the purpose of description and not by way of limitation: (a) construction of recombinant cDNA and RNA templates; (b) expression of heterologous gene products using recombinant cDNA and RNA templates; and (c) rescue of the heterologous genes in recombinant virus particles.

[0082] 5.1. Construction of the Recombinant cDNA and RNA

[0083] The present invention encompasses recombinant or chimeric viruses encoded by viral vectors derived from the genomes of parainfluenza virus, including both bovine parainfluenza virus and mammalian parainfluenza virus. In accordance with the present invention, a recombinant virus is one derived from a bovine parainfluenza virus or a mammalian parainfluenza virus that is encoded by endogenous or native genomic sequences or non-native genomic sequences. In accordance with the invention, a non-native sequence is one that is different from the native or endogenous genomic sequence due to one or more mutations, including, but not limited to, point mutations, rearrangements, insertions, deletions etc. to the genomic sequence that may or may not result a phenotypic change. The recombinant viruses of the invention encompass those viruses encoded by viral vectors derived from the genomes of parainfluenza virus, including both bovine and mammalian parainfluenza virus, and may or may not, include nucleic acids that are non-native to the viral genome. In accordance with the present invention, a viral vector which is derived from the genome of a parainfluenza virus is one that contains a nucleic acid sequence that encodes at least a part of one ORF of a parainfluenza virus.

[0084] The present invention also encompasses recombinant viruses comprising a viral vector derived from a bovine and/or mammalian PIV genome which contains sequences which result in a virus having a phenotype more suitable for use in vaccine formulations, e.g., attenuated phenotype or enhanced antigenicity. The mutations and modifications can be in coding regions, in intergenic regions and in the leader and trailer sequences of the virus.

[0085] In accordance with the present invention, the viral vectors of the invention are derived from the genome of a mammalian parainfluenza virus, in particular a human parainfluenza virus (hPIV). In particular embodiments of the invention, the viral vector is derived from the genome of a human parainfluenza virus type 3. In accordance with the present invention, these viral vectors may or may not include nucleic acids that are non-native to the viral genome.

[0086] In accordance with the present invention, the viral vectors of the inventions are derived from the genome of a bovine parainfluenza virus (bPIV). In particular embodiments of the invention, the viral vector is derived from the genome of bovine parainfluenza virus type 3. In accordance to the present invention, these viral vectors may or may include nucleic acids that are non-native to the viral genome.

[0087] In accordance with the invention, a chimeric virus is a recombinant bPIV or hPIV which further comprises a heterologous nucleotide sequence. In accordance with the invention, a chimeric virus may be encoded by a nucleotide sequence in which heterologous nucleotide sequence have been added to the genome or in which endogenous or native nucleotide sequence have been replaced with heterologous nucleotide sequence. In accordance with the invention, the chimeric viruses are encoded by the viral vectors of the invention which further comprise a heterologous nucleotide sequence. In accordance with the present invention, a chimeric virus is encoded by a viral vector that may or may not include nucleic acids that are non-native to the viral genome. In accordance with the invention, a chimeric virus is encoded by a viral vector to which heterologous nucleotide sequences have been added, inserted or substituted for native or non-native sequences.

[0088] A chimeric virus may be of particular use for the generation of recombinant vaccines protecting against two or more viruses (Tao et al., J. Virol. 72, 2955-2961; Durbin et al., 2000, J. Virol. 74, 6821-6831; Skiadopoulos et al., 1998, J. Virol. 72, 1762-1768 (1998); Teng et al., 2000, J. Virol. 74, 9317-9321). For example, it can be envisaged that a hPIV or bPIV virus vector expressing one or more proteins of another negative strand RNA virus, e.g., MPV, or a RSV vector expressing one or more proteins of MPV will protect individuals vaccinated with such vector against both virus infections. A similar approach can be envisaged for other paramyxoviruses. Attenuated and replication-defective viruses may be of use for vaccination purposes with live vaccines as has been suggested for other viruses. (See, PCT WO 02/057302, at pp. 6 and 23, incorporated by reference herein).

[0089] In accordance with the present invention the heterologous to be incorporated into the viral vectors encoding the recombinant or chimeric viruses of the invention include sequences obtained or derived from different strains of metapneumovirus, strains of avian pneumovirus, and other negative strand RNA viruses, including, but not limited to, RSV, PIV, influenza virus and other viruses, including morbillivirus.

[0090] In certain embodiments of the invention, the chimeric or recombinant viruses of the invention are encoded by viral vectors derived from viral genomes wherein one or more sequences, intergenic regions, termini sequences, or portions or entire ORF have been substituted with a heterologous or non-native sequence. In certain embodiments of the invention, the chimeric viruses of the invention are encoded by viral vectors derived from viral genomes wherein one or more heterologous sequences have been added to the vector.

[0091] A specific embodiment of the present invention is a chimeric virus comprising a backbone encoded by nucleotide sequences derived from a parainfluenza virus genome. In a preferred embodiment, the PIV genome is derived from bovine PIV, such as the Kansas strain of bPIV3, or from human PIV. In a preferred embodiment, the PIV genome is derived from the Kansas strain of bPIV3, in which bovine parainfluenza virus nucleotide sequences have been substituted with heterologous sequences or in which heterologous sequences have been added to the complete bPIV genome. A further specific embodiment of the present invention is a chimeric virus comprising a backbone encoded by nucleotide sequences derived from human parainfluenza-virus type 3 genome, in which human parainfluenza virus nucleotide sequences have been substituted with heterologous sequences or in which heterologous sequences have been added to the complete hPIV genome. An additional specific embodiment of the present invention is a chimeric virus comprising a backbone encoded by nucleotide sequences derived from bovine parainfluenza virus genome, such as the Kansas strain of bPIV3, in which (a) the bovine parainfluenza virus F gene and HN gene have been substituted with the F gene and the HN gene of the human parainfluenza virus (bPIV/hPIV), and in which (b) heterologous sequences have been added to the complete bPIV genome.

[0092] The present invention also encompasses chimeric viruses comprising a backbone encoded by nucleotide sequences derived from the bPIV, the hPIV, or the bPIV/hPIV genome containing mutations or modifications, in addition to heterologous sequences, that result in a chimeric virus having a phenotype more suitable for use in vaccine formulations, e.g., attenuated phenotype or enhanced antigenicity. In accordance with this particular embodiment of the invention, a heterologous sequence in the context of a bovine PIV3 backbone may be any sequence heterologous to bPIV3.

[0093] Another specific embodiment of the present invention is a chimeric virus comprising a backbone encoded by nucleotide sequences derived from human PIV 1, 2, or 3 in which hPIV nucleotide sequences have been substituted with heterologous sequences or in which heterologous sequences have been added to the complete hPIV genome, with the proviso that the resulting chimeric virus is not a chimeric hPIV3 in which the hemagglutinin-neuraminidase and fusion glycoproteins have been replaced by those of hPIV1. The present invention also encompasses chimeric viruses, comprising a backbone encoded by nucleotide sequences derived from a hPIV genome, containing mutations or modifications, in addition to heterologous sequences, that result in a chimeric virus having a phenotype more suitable for use in vaccine formulations, e.g., attenuated phenotype or enhanced antigenicity.

[0094] Heterologous gene coding sequences flanked by the complement of the viral polymerase binding site/promoter, e.g., the complement of 3′-PIV virus terminus of the present invention, or the complements of both the 3′- and 5′-PIV virus termini may be constructed using techniques known in the art. The resulting RNA templates may be of the negative-polarity and can contain appropriate terminal sequences that enable-the viral RNA-synthesizing apparatus to recognize the template. Alternatively, positive-polarity RNA templates, that contain appropriate terminal sequences which enable the viral RNA-synthesizing apparatus to recognize the template, may also be used. Recombinant DNA molecules containing these hybrid sequences can be cloned and transcribed by a DNA-directed RNA polymerase, such as bacteriophage T7 polymerase, T3 polymerase, the SP6 polymerase or a eukaryotic polymerase such as polymerase I and the like, for the in vitro or in vivo production of recombinant RNA templates that possess the appropriate viral sequences and that allow for viral polymerase recognition and activity.

[0095] In one embodiment, the PIV vector of the invention expresses one, two, or three heterologous sequences, encoding antigenic polypeptides and peptides. In some embodiments, the heterologous sequences are derived from the same virus or from different viruses. In certain embodiments, more than one copy of the same heterologous nucleotide sequences are inserted in the genome of a bovine parainfluenza virus, human parainfluenza virus, or bPIV/hPIV chimeric vector. In a preferred embodiment, two copies of the same heterologous nucleotide sequences are inserted to the genome of the virus of the invention. In some embodiments, the heterologous nucleotide sequence is derived from a metapneumovirus, such as human metapneumovirus or an avian pneumovirus. In specific embodiments, the heterologous nucleotide sequence derived from a metapneumovirus is a F gene of the metapneumovirus. In other specific embodiments, the heterologous nucleotide sequence derived from a metapneumovirus is a G gene of the metapneumovirus. In some other embodiments, the heterologous nucleotide sequence is derived from a respiratory syncytial virus. In specific embodiments, the heterologous nucleotide sequence derived from respiratory syncytial virus is a F gene of the respiratory syncytial virus. In other specific embodiments, the heterologous nucleotide sequence derived from respiratory syncytial virus is a G gene of the respiratory syncytial virus. When one or more heterologous nucleotide sequences are inserted, the position of the insertion and the length of the intergenic region of each inserted copy can be manipulated and determined by different assays according to section 5.1.2. infra.

[0096] In certain embodiments, rescue of the chimeric virus or expression products may be achieved by reverse genetics in host cell systems where the host cells are transfected with chimeric cDNA or RNA constructs. The RNA templates of the present invention are prepared by transcription of appropriate DNA sequences with a DNA-directed RNA polymerase. The RNA templates of the present invention may be prepared either in vitro or in vivo by transcription of appropriate DNA sequences using a DNA-directed RNA polymerase such as bacteriophage T7 polymerase, T3 polymerase, the SP6 polymerase, or a eukaryotic polymerase such as polymerase I. In certain embodiments, the RNA templates of the present invention may be prepared either in vitro or in vivo by transcription of appropriate DNA sequences using a plasmid-based expression system as described in Hoffmann et al., 2000, Proc. Natl. Acad. Sci. USA 97:6108-6113 or the unidirectional RNA polymerase I-polymerase II transcription system as described in Hoffmann and Webster, 2000, J. Gen. Virol. 81:2843-2847. The resulting RNA templates of negative-polarity would contain appropriate terminal sequences that would enable the viral RNA-synthesizing apparatus to recognize the template. Alternatively, positive-polarity RNA templates that contain appropriate terminal sequences and enable the viral RNA-synthesizing apparatus to recognize the template may also be used. Expression from positive polarity RNA templates may be achieved by transfection of plasmids having promoters that are recognized by the DNA-dependent RNA polymerase. For example, plasmid DNA, encoding positive RNA templates under the control of a T7 promoter, can be used in combination with the vaccinia virus or fowlpox T7 system.

[0097] Bicistronic mRNAs can be constructed to permit internal initiation of translation of viral sequences and to allow for the expression of foreign protein coding sequences from the regular terminal initiation site, or vice versa. Alternatively, a foreign protein may be expressed from an internal transcriptional unit in which the transcriptional unit has an initiation site and polyadenylation site. In another embodiment, the foreign gene is inserted into a PIV gene such that the resulting expressed protein is a fusion protein.

[0098] In certain embodiments, the invention relates to trivalent vaccines comprising a virus of the invention. In specific embodiments, the virus used for a trivalent vaccine is a chimeric bovine parainfluenza type 3/human parainfluenza type3 virus containing a first heterologous nucleotide sequence derived from a metapneumovirus, such as human metapneumovirus or avian pneumovirus, and a second heterologous nucleotide sequence derived from respiratory syncytial virus. In an exemplary embodiment, such a trivalent vaccine would be specific to (a) the gene products of the F gene and the HN gene of the human parainfluenza virus; (b) the protein encoded by the heterologous nucleotide sequence derived from a metapneumovirus; and (c) the protein encoded by the heterologous nucleotide sequence derived from a respiratory syncytial virus. In a specific embodiment, the first heterologous nucleotide sequence is the F gene of the respiratory syncytial virus and is inserted in position 1, and the second heterologous nucleotide sequence is the F gene of the human metapneumovirus and is inserted in position 3. Many more combinations are encompassed by the present invention and some are shown by way of example in Table 1. For other combinations the F or G gene of an avian pneumovirus could be used. Further, nucleotide sequences encoding chimeric F proteins could be used (see supra). In some less preferred embodiments, the heterologous nucleotide sequence can be inserted at higher-numbered positions of the viral genome.

TABLE 1
Exemplary arrangements of heterologous nucleotide sequences in
the viruses used for trivalent vaccines.

| Combination | Position 1 | Position 2 | Position 3 |
|---|---|---|---|
| 1 | F-gene of hMPV | F-gene of RSV | — |
| 2 | F-gene of RSV | F-gene of hMPV | — |
| 3 | — | F-gene of hMPV | F-gene of RSV |
| 4 | — | F-gene of RSV | F-gene of hMPV |
| 5 | F-gene of hMPV | — | F-gene of RSV |
| 6 | F-gene of RSV | — | F-gene of hMPV |
| 7 | G-gene of hMPV | G-gene of RSV | — |
| 8 | G-gene of RSV | G-gene of hMPV | — |
| 9 | — | G-gene of hMPV | G-gene of RSV |
| 10 | — | G-gene of RSV | G-gene of hMPV |
| 11 | G-gene of hMPV | — | G-gene of RSV |
| 12 | G-gene of RSV | — | G-gene of hMPV |
| 13 | F-gene of hMPV | G-gene of RSV | — |
| 14 | G-gene of RSV | F-gene of hMPV | — |
| 15 | — | F-gene of hMPV | G-gene of RSV |
| 16 | — | G-gene of RSV | F-gene of hMPV |
| 17 | F-gene of hMPV | — | G-gene of RSV |
| 18 | G-gene of RSV | — | F-gene of hMPV |
| 19 | G-gene of hMPV | F-gene of RSV | — |
| 20 | F-gene of RSV | G-gene of hMPV | — |
| 21 | — | G-gene of hMPV | F-gene of RSV |
| 22 | — | F-gene of RSV | G-gene of hMPV |
| 23 | G-gene of hMPV | — | F-gene of RSV |
| 24 | F-gene of RSV | — | G-gene of hMPV |

[0099] In some other embodiments, the intergenic region between a heterologous sequence and the start of the coding sequence of the downstream gene can be altered. For example, each gene listed on Table 1 may have a desirable length of the intergenic region. In an examplary embodiment, a trivalent vaccine comprises a b/h PIV3 vector with a F gene of respiratory syncytial virus inserted at position 1, an altered intergenic region of 177 nucleotides (originally 75 nucleotides to the downstream N gene start codon AUG), and a F gene of human metapneumovirus inserted at position 3 with its natural intergenic region. Many more combinations are encompassed by the present invention, as each insertion of a heterologous nucleotide sequence may be manipulated according to section 5.1.2., infra.

[0100] In a broader embodiment, the expression products and chimeric virions of the present invention may be engineered to create vaccines against a broad range of pathogens, including viral antigens, tumor antigens and auto antigens involved in autoimmune disorders. One way to achieve this goal involves modifying existing PIV genes to contain foreign sequences in their respective external domains. Where the heterologous sequences are epitopes or antigens of pathogens, these chimeric viruses may be used to induce a protective immune response against the disease agent from which these determinants are derived.

[0101] One approach for constructing these hybrid molecules is to insert the heterologous nucleotide sequence into a DNA complement of a PIV genome, e.g., a hPIV, a bPIV, or a bPIV/hPIV, so that the heterologous sequence is flanked by the viral sequences required for viral polymerase activity; i.e., the viral polymerase binding site/promoter, hereinafter referred to as the viral polymerase binding site, and a polyadenylation site. In a preferred embodiment, the heterologous coding sequence is flanked by the viral sequences that comprise the replication promoters of the 5′ and 3′ termini, the gene start and gene end sequences, and the packaging signals that are found in the 5′ and/or the 3′ termini. In an alternative approach, oligonucleotides encoding the viral polymerase binding site, e.g., the complement of the 3′-terminus or both termini of the virus genomic segment can be ligated to the heterologous coding sequence to construct the hybrid molecule. The placement of a foreign gene or segment of a foreign gene within a target sequence was formerly dictated by the presence of appropriate restriction enzyme sites within the target sequence. However, recent advances in molecular biology have lessened this problem greatly. Restriction enzyme sites can readily be placed anywhere within a target sequence through the use of site-directed mutagenesis (e.g., see, for example, the techniques described by Kunkel, 1985, Proc. Natl. Acad. Sci. U.S.A. 82;488). Variations in polymerase chain reaction (PCR) technology, described infra, also allow for the specific insertion of sequences (i.e., restriction enzyme sites) and also allow for the facile construction of hybrid molecules. Alternatively, PCR reactions could be used to prepare recombinant templates without the need of cloning. For example, PCR reactions could be used to prepare double-stranded DNA molecules containing a DNA-directed RNA polymerase promoter (e.g., bacteriophage T3, T7 or SP6) and the hybrid sequence containing the heterologous gene and the PIV polymerase binding site. RNA templates could then be transcribed directly from this recombinant DNA. In yet another embodiment, the recombinant RNA templates may be prepared by ligating RNAs specifying the negative polarity of the heterologous gene and the viral polymerase binding site using an RNA ligase.

[0102] In addition, one or more nucleotides can be added at the 3′ end of the HN gene in the untranslated region to adhere to the “Rule of Six” which may be important in successful virus rescue. The “Rule of Six” applies to many paramyxoviruses and requires that the number of nucleotides of an RNA genome be a factor of six to be functional. The addition of nucleotides can be accomplished by techniques known in the art such as using a commercial mutagenesis kits like the QuikChange mutagenesis kit (Stratagene). After addition of the appropriate number of nucleotides, the correct DNA fragment, for example, a DNA fragment of the hPIV3 F and HN gene, can then be isolated upon digestion with the appropriate restriction enzyme and gel purification. Sequence requirements for viral polymerase activity and constructs that may be used in accordance with the invention are described in the subsections below.

[0103] Without being bound by theory, several parameters affect the rate of replication of the recombinant virus and the level of expression of the heterologous sequence. In particular, the position of the heterologous sequence in bPIV, hPIV, b/h PIV and the length of the intergenic region that flanks the heterologous sequence determine rate of replication and expression level of the heterologous sequence.

[0104] In certain embodiments, the leader and or trailer sequence of the virus are modified relative to the wild type virus. In certain more specific embodiments, the lengths of the leader and/or trailer are altered. In other embodiments, the sequence(s) of the leader and/or trailer are mutated relative to the wild type virus.

[0105] The production of a recombinant virus of the invention relies on the replication of a partial or full-length copy of the negative sense viral RNA (vRNA) genome or a complementary copy thereof (cRNA). This vRNA or cRNA can be isolated from infectious virus, produced upon in-vitro transcription, or produced in cells upon transfection of nucleic acids. Second, the production of recombinant negative strand virus relies on a functional polymerase complex. Typically, the polymerase complex of pneumoviruses consists of N, P, L and possibly M2 proteins, but is not necessarily limited thereto.

[0106] Polymerase complexes or components thereof can be isolated from virus particles, isolated from cells expressing one or more of the components, or produced upon transfection of specific expression vectors.

[0107] Infectious copies of MPV can be obtained when the above mentioned vRNA, cRNA, or vectors expressing these RNAs are replicated by the above mentioned polymerase complex 16 (Schnell et al., 1994, EMBO J 13: 4195-4203; Collins et al., 1995, PNAS 92: 11563-11567; Hoffmann et al., 2000, PNAS 97: 6108-6113; Bridgen et al., 1996, PNAS 93: 15400-15404; Palese et al., 1996, PNAS 93: 11354-11358; Peeters et al., 1999, J. Virol. 73: 5001-5009; Durbin et al., 1997, Virology 235: 323-332).

[0108] The invention provides a host cell comprising a nucleic acid or a vector according to the invention. Plasmid or viral vectors containing the polymerase components of PIV (presumably N, P, L and M2, but not necessarily limited thereto) are generated in prokaryotic cells for the expression of the components in relevant cell types (bacteria, insect cells, eukaryotic cells). Plasmid or viral vectors containing full-length or partial copies of the PIV genome will be generated in prokaryotic cells for the expression of viral nucleic acids in vitro or in vivo. The latter vectors may contain other viral sequences for the generation of chimeric viruses or chimeric virus proteins, may lack parts of the viral genome for the generation of replication defective virus, and may contain mutations, deletions or insertions for the generation of attenuated viruses.

[0109] Infectious copies of PIV (being wild type, attenuated, replication-defective or chimeric) can be produced upon co-expression of the polymerase components according to the state-of-the-art technologies described above.

[0110] In addition, eukaryotic cells, transiently or stably expressing one or more full-length or partial PIV proteins can be used. Such cells can be made by transfection (proteins or nucleic acid vectors), infection (viral vectors) or transduction (viral vectors) and may be useful for complementation of mentioned wild type, attenuated, replication-defective or chimeric viruses.

[0111] 5.1.1. Heterologous Gene Sequences to be Inserted

[0112] The present invention encompass engineering recombinant bovine or human parainfluenza viruses to express one or more heterologous sequences, wherein the heterologous sequences encode gene products or fragments of gene products that are preferably antigenic and/or immunogenic. As used herein, the term “antigenic” refers to the ability of a molecule to bind antibody or MHC molecules. The term “immunogenic” refers to the ability of a molecule to generate immune response in a host.

[0113] In a preferred embodiment, the heterologous nucleotide sequence to be inserted is derived from a negative strand RNA virus, including but not limited to, influenza virus, parainfluenza virus, respiratory syncytial virus, mammalian metapneumovirus (e.g., human metapneumovirus) and avian pneumovirus. In a preferred embodiment, the heterologous sequence to be inserted includes, but is not limited to, a sequence that encodes a F or HN gene of human PIV, a F gene of RSV, a HA gene of influenza virus type A, B, or C, a F gene of human MPV, a F gene of avian pneumovirus, or an immunogenic and/or antigenic fragment thereof.

[0114] In some embodiments, the heterologous nucleotide sequence to be inserted is derived from a human metapneumovirus and/or an avian pneumovirus. In certain embodiments, the heterologous nucleotide sequence to be inserted is derived from (a) a human metapneumovirus and a respiratory syncytial virus; and/or (b) an avian pneumovirus and a respiratory syncytial virus.

[0115] In certain preferred embodiments of the invention, the heterologous nucleotide sequence to be inserted is derived from a F gene from a human metapneumovirus and/or an avian pneumovirus. In certain embodiments, the F gene is derived from (a) a human metapneumovirus and a respiratory syncytial virus; and/or (b) an avian pneumovirus and a respiratory syncytial virus.

[0116] In certain embodiments of the invention, the heterologous nucleotide sequence to be inserted is a G gene derived from a human metapneumovirus and/or an avian pneumovirus. In certain embodiments, the G gene is derived from (a) a human metapneumovirus and a respiratory syncytial virus; and/or (b) an avian pneumovirus and a respiratory syncytial virus.

[0117] In certain embodiments, any combination of different F genes and/or different G genes derived from human metapneumovirus, avian pneumovirus, and respiratory syncytial virus can be inserted into the virus of the invention with the proviso that in all embodiments at least one heterologous sequence derived from either human metapneumovirus or avian pneumovirus is present in the recombinant parainfluenza virus of the invention.

[0118] In certain embodiments, the nucleotide sequence to be inserted is a nucleotide sequence encoding a F protein derived from a human metapneumovirus. In certain other embodiments, the nucleotide sequence to be inserted is a nucleotide sequence encoding a G protein derived from a human metapneumovirus. In yet other embodiments, the nucleotide sequence to be inserted is a nucleotide sequence encoding a F protein derived from an avian pneumovirus. In yet other embodiments, the nucleotide sequence to be inserted is a nucleotide sequence encoding a G protein derived from an avian pneumovirus. With the proviso that in all embodiments of the invention at least one heterologous nucleotide sequence is derived from a metapneumovirus, the heterologous nucleotide sequence to be inserted encodes a F protein or a G protein of a respiratory syncytial virus.

[0119] In certain embodiments, the nucleotide sequence to be inserted encodes a chimeric F protein or a chimeric G protein. A chimeric F protein comprises parts of F proteins from different viruses, such as a human metapneumovirus, avian pneumovirus and/or respiratory syncytial virus. A chimeric G protein comprises parts of G proteins from different viruses, such as a human metapneumovirus, avian pneumovirus and/or respiratory syncytial virus. In a specific embodiment, the F protein comprises an ectodomain of a F protein of a metapneumovirus, a transmembrane domain of a F protein of a parainfluenza virus, and luminal domain of a F protein of a parainfluenza virus. In certain embodiments, the nucleic acid to be inserted encodes a F protein, wherein the transmembrane domain of the F protein is deleted so that a soluble F protein is expressed.

[0120] In certain specific embodiments, the heterologous nucleotide sequence of the invention is any one of SEQ ID NO:1 through SEQ ID NO:5, SEQ ID NO:14, and SEQ ID NO:15 (see Table 16). In certain specific embodiments, the nucleotide sequence encodes a protein of any one of SEQ ID NO:6 through SEQ ID NO:13, SEQ ID NO:16, and SEQ ID NO:17 (see Table 16). In certain specific embodiments, the nucleotide sequence encodes a protein of any one of SEQ ID NO. 314 to 389.

[0121] For heterologous nucleotide sequences derived from respiratory syncytial virus see, e.g., PCT/US98/20230, which is hereby incorporated by reference in its entirety.

[0122] In a preferred embodiment, heterologous gene sequences that can be expressed into the chimeric viruses of the invention include but are not limited to those encoding antigenic epitopes and glycoproteins of viruses, such as influenza glycoproteins, in particular hemagglutinin H5, H7, respiratory syncytial virus epitopes, New Castle Disease virus epitopes, Sendai virus and infectious Laryngotracheitis virus (ILV), that result in respiratory disease. In a most preferred embodiment, the heterologous nucleotide sequences are derived from a metapneumovirus, such as human metapneumovirus and/or avian pneumovirus. In yet another embodiment of the invention, heterologous gene sequences that can be engineered into the chimeric viruses of the invention include, but are not limited to, those encoding viral epitopes and glycoproteins of viruses, such as hepatitis B virus surface antigen, hepatitis A or C virus surface glycoproteins of Epstein Barr virus, glycoproteins of human papilloma virus, simian virus 5 or mumps virus, West Nile virus, Dengue virus, glycoproteins of herpesviruses, VPI of poliovirus, and sequences derived from a human immunodeficiency virus (HIV), preferably type 1 or type 2. In yet another embodiment, heterologous gene sequences that can be engineered into chimeric viruses of the invention include, but are not limited to, those encoding Marek's Disease virus (MDV) epitopes, epitopes of infectious Bursal Disease virus (IBDV), epitopes of Chicken Anemia virus, infectious laryngotracheitis virus (ILV), Avian Influenza virus (AIV), rabies, feline leukemia virus, canine distemper virus, vesicular stomatitis virus, and swinepox virus (see Fields et al. (ed.), 1991, FUNDAMENTAL VIROLOGY, Second Edition, Raven Press, New York, incorporated by reference herein in its entirety).

[0123] Other heterologous sequences of the present invention include those encoding antigens that are characteristic of autoimmune diseases. These antigens will typically be derived from the cell surface, cytoplasm, nucleus, mitochondria and the like of mammalian tissues, including antigens characteristic of diabetes mellitus, multiple sclerosis, systemic lupus erythematosus, rheumatoid arthritis, pernicious anemia, Addison's disease, scleroderma, autoimmune atrophic gastritis, juvenile diabetes, and discoid lupus erythromatosus.

[0124] Antigens that are allergens generally include proteins or glycoproteins, including antigens derived from pollens, dust, molds, spores, dander, insects and foods. In addition, antigens that are characteristic of tumor antigens typically will be derived from the cell surface, cytoplasm, nucleus, organelles and the like of cells of tumor tissue. Examples include antigens characteristic of tumor proteins, including proteins encoded by mutated oncogenes; viral proteins associated with tumors; and glycoproteins. Tumors include, but are not limited to, those derived from the types of cancer: lip, nasopharynx, pharynx and oral cavity, esophagus, stomach, colon, rectum, liver, gall bladder, pancreas, larynx, lung and bronchus, melanoma of skin, breast, cervix, uterine, ovary, bladder, kidney, uterus, brain and other parts of the nervous system, thyroid, prostate, testes, Hodgkin's disease, non-Hodgkin's lymphoma, multiple myeloma and leukemia.

[0125] In one specific embodiment of the invention, the heterologous sequences are derived from the genome of human immunodeficiency virus (HIV), preferably human immunodeficiency virus-1 or human immunodeficiency virus-2. In another embodiment of the invention, the heterologous coding sequences may be inserted within a PIV gene coding sequence such that a chimeric gene product, that contains the heterologous peptide sequence within the PIV viral protein, is expressed. In such an embodiment of the invention, the heterologous sequences may also be derived from the genome of a human immunodeficiency virus, preferably of human immunodeficiency virus-1 or human immunodeficiency virus-2.

[0126] In instances whereby the heterologous sequences are HIV-derived, such sequences may include, but are not limited to sequences derived from the env gene (i.e., sequences encoding all or part of gp160, gp120, and/or gp41), the pol gene (i.e., sequences encoding all or part of reverse transcriptase, endonuclease, protease, and/or integrase), the gag gene (i.e., sequences encoding all or part of p7, p6, p55, p17/18, p24/25) tat, rev, nef, vif, vpu, vpr, and/or vpx.

[0127] In another embodiment, heterologous gene sequences that can be engineered into the chimeric viruses include those that encode proteins with immunopotentiating activities. Examples of immunopotentiating proteins include, but are not limited to, cytokines, interferon type 1, gamma interferon, colony stimulating factors, and interleukin-1, -2, -4, -5, -6, -12.

[0128] In addition, other heterologous gene sequences that may be engineered into the chimeric viruses include those encoding antigens derived from bacteria such as bacterial surface glycoproteins, antigens derived from fungi, and antigens derived from a variety of other pathogens and parasites. Examples of heterologous gene sequences derived from bacterial pathogens include, but are not limited to, those encoding antigens derived from species of the following genera: Salmonella, Shigella, Chlamydia, Helicobacter, Yersinia, Bordatella, Pseudomonas, Neisseria, Vibrio, Haemophilus, Mycoplasma, Streptomyces, Treponema, Coxiella, Ehrlichia, Brucella, Streptobacillus, Fusospirocheta, Spirillum, Ureaplasma, Spirochaeta, Mycoplasma, Actinomycetes, Borrelia, Bacteroides, Trichomoras, Branhamella, Pasteurella, Clostridium, Corynebacterium, Listeria, Bacillus, Erysipelothrix, Rhodococcus, Escherichia, Klebsiella, Pseudomanas, Enterobacter, Serratia, Staphylococcus, Streptococcus, Legionella, Mycobacterium, Proteus, Campylobacter, Enterococcus, Acinetobacter, Morganella, Moraxella, Citrobacter, Rickettsia, Rochlimeae, as well as bacterial species such as: P. aeruginosa, E. coli, P. cepacia, S. epidermis, E. faecalis, S. pneumonias, S. aureus, N. meningitidis, S. pyogenes, Pasteurella multocida, Treponema pallidum, and P. mirabilis.

[0129] Examples of heterologous gene sequences derived from pathogenic fungi, include, but are not limited to, those encoding antigens derived from fungi such as Cryptococcus neoformans; Blastomyces dermatitidis; Aiellomyces dermatitidis; Histoplasma capsulatum; Coccidioides immitis; Candida species, including C. albicans, C. tropicalis, C. parapsilosis, C. guilliermondii and C. krusei, Aspergillus species, including A. fumigatus, A. flavus and A. niger, Rhizopus species; Rhizomucor species; Cunninghammella species; Apophysomyces species, including A. saksenaea, A. mucor and A. absidia; Sporothrix schenckii, Paracoccidioides brasiliensis; Pseudallescheria boydii, Torulopsis glabrata; Trichophyton species, Microsporum species and Dermatophyres species, as well as any other yeast or fungus now known or later identified to be pathogenic.

[0130] Finally, examples of heterologous gene sequences derived from parasites include, but are not limited to, those encoding antigens derived from members of the Apicomplexa phylum such as, for example, Babesia, Toxoplasma, Plasmodium, Eimeria, Isospora, Atoxoplasma, Cystoisospora, Hammondia, Besniotia, Sarcocystis, Frenkelia, Haemoproteus, Leucocytozoon, Theileria, Perkinsus and Gregarina spp.; Pneumocystis carinii; members of the Microspora phylum such as, for example, Nosema, Enterocytozoon, Encephalitozoon, Septata, Mrazekia, Amblyospora, Ameson, Glugea, Pleistophora and Microsporidium spp.; and members of the Ascetospora phylum such as, for example, Haplosporidium spp., as well as species including Plasmodium falciparum, P. vivax, P. ovale, P. malaria; Toxoplasma gondii; Leishmania mexicana, L. tropica, L. major, L. aethiopica, L. donovani, Trypanosoma cruzi, T. brucei, Schistosoma mansoni, S. haematobium, S. japonium; Trichinella spiralis; Wuchereria bancrofti; Brugia malayli; Entamoeba histolytica, Enterobius vermiculoarus; Taenia solium, T. saginata, Trichomonas vaginatis, T. hominis, T. tenax, Giardia lamblia; Cryptosporidium parvum; Pneumocytis carinii, Babesia bovis, B. divergens, B. microti, Isospora belli, L. hominis; Dientamoeba fragilis; Onchocerca volvulus; Ascaris lumbricoides; Necator americanis; Ancylostoma duodenale; Strongyloides stercoralis; Capillaria philippinensis; Angiostrongylus cantonensis, Hymenolepis nana; Diphyllobothrium latum; Echinococcus granulosus, E. multilocularis; Paragonimus westermani, P. caliensis; Chlonorchis sinensis; Opisthorchis felineas, G. Viverini, Fasciola hepatica, Sarcoptes scabiei, Pediculus humanus; Phthirlus pubis; and Dermatobia hominis, as well as any other parasite now known or later identified to be pathogenic.

[0131] 5.1.2. Metapneumoviral Sequences to be Inserted

[0132] proteins of a mammalian MPV. The invention further relates to nucleic acid sequences encoding fusion proteins, wherein the fusion protein contains a protein of a mammalian MPV or a fragment thereof and one or more peptides or proteins that are not derived from mammalian MPV. In a specific embodiment, a fusion protein of the invention contains a protein of a mammalian MPV or a fragment thereof and a peptide tag, such as, but not limited to a polyhistidine tag. The invention further relates to fusion proteins, wherein the fusion protein contains a protein of a mammalian MPV or a fragment thereof and one or more peptides or proteins that are not derived from mammalian MPV. The invention also relates to derivatives of nucleic acids encoding a protein of a mammlian MPV. The invention also relates to derivatives of proteins of a mammalian MPV. A derivative can be, but is not limited to, mutant forms of the protein, such as, but not limited to, additions, deletions, truncations, substitutions, and inversions. A derivative can further be a chimeric form of the protein of the mammalian MPV, wherein at least one domain of the protein is derived from a different protein. A derivative can also be a form of a protein of a mammalian MPV that is covalently or non-covalently linked to another molecule, such as, e.g., a drug.

[0133] The viral isolate termed NL/1/00 (also 00-1) is a mammalian MPV of variant A1 and its genomic sequence is shown in SEQ ID NO:95. The viral isolate termed NL/17/00 is a mammalian MPV of variant A2 and its genomic sequence is shown in SEQ ID NO:96. The viral isolate termed NL/1/99 (also 99-1) is a mammalian MPV of variant B1 and its genomic sequence is shown in SEQ ID NO:94. The viral isolate termed NL/1/94 is a mammalian MPV of variant B2 and its genomic sequence is shown in SEQ ID NO:97. A list of sequences disclosed in the present application and the corresponding SEQ ID Nos is set forth in Table 16.

[0134] The protein of a mammalian MPV can be a an N protein, a P protein, a M protein, a F protein, a M2-1 protein or a M2-2 protein or a fragment thereof. A fragment of a protein of a mammlian MPV can be can be at least 25 amino acids, at least 50 amino acids, at least 75 amino acids, at least 100 amino acids, at least 125 amino acids, at least 150 amino acids, at least 175 amino acids, at least 200 amino acids, at least 225 amino acids, at least 250 amino acids, at least 275 amino acids, at least 300 amino acids, at least 325 amino acids, at least 350 amino acids, at least 375 amino acids, at least 400 amino acids, at least 425 amino acids, at least 450 amino acids, at least 475 amino acids, at least 500 amino acids, at least 750 amino acids, at least 1000 amino acids, at least 1250 amino acids, at least 1500 amino acids, at least 1750 amino acids, at least 2000 amino acids or at least 2250 amino acids in length. A fragment of a protein of a mammlian MPV can be can be at most 25 amino acids, at most 50 amino acids, at most 75 amino acids, at most 100 amino acids, at most 125 amino acids, at most 150 amino acids, at most 175 amino acids, at most 200 amino acids, at most 225 amino acids, at most 250 amino acids, at most 275 amino acids, at most 300 amino acids, at most 325 amino acids, at most 350 amino acids, at most 375 amino acids, at most 400 amino acids, at most 425 amino acids, at most 450 amino acids, at most 475 amino acids, at most 500 amino acids, at most 750 amino acids, at most 1000 amino acids, at most 1250 amino acids, at most 1500 amino acids, at most 1750 amino acids, at most 2000 amino acids or at most 2250 amino acids in length.

[0135] In certain embodiments of the invention, the protein of a mammalian MPV is a N protein, wherein the N protein is phylogenetically closer related to a N protein of a mammalian MPV, such as the N protein encoded by, e.g., the viral genome of SEQ ID NO:94, SEQ ID NO:95, SEQ ID NO:96, or SEQ ID NO:97, (see also Table 16 for a description of the SEQ ID Nos) than it is related to the N protein of APV type C. In certain embodiments of the invention, the protein of a mammalian MPV is a P protein, wherein the P protein is phylogenetically closer related to a P protein of a mammalian MPV, such as the P protein encoded by, e.g., the viral genome of SEQ ID NO:NO:94, SEQ ID NO:95, SEQ ID NO:96, or SEQ ID NO:97, than it is related to the N protein of APV type C. In certain embodiments of the invention, the protein of a mammalian MPV is a M protein, wherein the M protein is closer related to a M protein of a mammalian MPV, such as the M protein encoded by, e.g., the viral genome of SEQ ID NO:94, SEQ ID NO:95, SEQ ID NO:96, or SEQ ID NO:97, than it is related to the M protein of APV type C. In certain embodiments of the invention, the protein of a mammalian MPV is a F protein, wherein the F protein is phylogenetically closer related to a F protein of a mammalian MPV, such as the F protein encoded by, e.g., the viral genome of SEQ ID NO:94, SEQ ID NO:95, SEQ ID NO:96, or SEQ ID NO:97, than it is related to the F protein of APV type C. In certain embodiments of the invention, the protein of a mammalian MPV is a M2-1 protein, wherein the M2-1 protein is phylogenetically closer related to a M2-1 protein of a mammalian MPV, such as the M2-1 protein encoded by, e.g., the viral genome of SEQ ID NO:94, SEQ ID NO:95, SEQ ID NO:96, or SEQ ID NO:97, than it is related to the M2-1 protein of APV type C. In certain embodiments of the invention, the protein of a mammalian MPV is a M2-2 protein, wherein the M2-2 protein is phylogenetically closer related to a M2-2 protein of a mammalian MPV, such as the M2-2 protein encoded by, e.g., the viral genome of SEQ ID NO:94, SEQ ID NO:95, SEQ ID NO:96, or SEQ ID NO:97, than it is related to the M2-2 protein of APV type C. In certain embodiments of the invention, the protein of a mammalian MPV is a G protein, wherein the G protein is phylogenetically closer related to a G protein of a mammalian MPV, such as the G protein encoded by, e.g., the viral genome of SEQ ID NO:94, SEQ ID NO:95, SEQ ID NO:96, or SEQ ID NO:97, than it is related to any protein of APV type C. In certain embodiments of the invention, the protein of a mammalian MPV is a SH protein, wherein the SH protein is phylogenetically closer related to a SH protein of a mammalian MPV, such as the SH protein encoded by, e.g., the viral genome of SEQ ID NO:94, SEQ ID NO:95, SEQ ID NO:96, or SEQ ID NO:97, than it is related to any protein of APV type C. In certain embodiments of the invention, the protein of a mammalian MPV is a L protein, wherein the L protein is phylogenetically closer related to a L protein of a mammalian MPV, such as the SH protein encoded by, e.g., the viral genome of SEQ ID NO:94, SEQ ID NO:95, SEQ ID NO:96, or SEQ ID NO:97, than it is related to any protein of APV type C.

[0136] In certain embodiments of the invention, the protein of a mammalian MPV is a N protein, wherein the N protein is at least 60%, at least 65%, at least 70%, at least 75%, at least 80%, at least 85%, at least 90%, at least 95%, at least 98%, at least 99%, or at least 99.5% identical to the amino acid sequence of a N protein encoded by the viral genome of SEQ ID NO:94, SEQ ID NO:95, SEQ ID NO:96, or SEQ ID NO:97 (the amino acid sequences of the respective N proteins are disclosed in SEQ ID NO:366-369; see also Table 16). In certain embodiments of the invention, the protein of a mammalian MPV is a N protein, wherein the P protein is at least 60%, at least 65%, at least 70%; at least 75%, at least 80%, at least 85%, at least 90%, at least 95%, at least 98%, at least 99%, or at least 99.5% identical to the amino acid sequence of a P protein encoded by the viral genome of SEQ ID NO:94, SEQ ID NO:95, SEQ ID NO:96, or SEQ ID NO:97 (the amino acid sequences of the respective P proteins are disclosed in SEQ ID NO:78-85; see also Table 16). In certain embodiments of the invention, the protein of a mammalian MPV is a M protein, wherein the M protein is at least 60%, at least 65%, at least 70%, at least 75%, at least 80%, at least 85%, at least 90%, at least 95%, at least 98%, at least 99%, or at least 99.5% identical to the amino acid sequence of a M protein encoded by the viral genome of SEQ ID NO:94, SEQ ID NO:95, SEQ ID NO:96, or SEQ ID NO:97 (the amino acid sequences of the respective M proteins are disclosed in SEQ ID NO:358-361; see also Table 16). In certain embodiments of the invention, the protein of a mammalian MPV is a F protein, wherein the F protein is at least 60%, at least 65%, at least 70%, at least 75%, at least 80%, at least 85%, at least 90%, at least 95%, at least 98%, at least 99%, or at least 99.5% identical to the amino acid sequence of a F protein encoded by the viral genome of SEQ ID NO:94, SEQ ID NO:95, SEQ ID NO:96, or SEQ ID NO:97 (the amino acid sequences of the respective F proteins are disclosed in SEQ ID NO:18-25; see also Table 16). In certain embodiments of the invention, the protein of a mammalian MPV is a M2-1 protein, wherein the M2-1 protein is at least 60%, at least 65%, at least 70%, at least 75%, at least 80%, at least 85%, at least 90%, at least 95%, at least 98%, at least 99%, or at least 99.5% identical to the amino acid sequence of a M2-1 protein encoded by the viral genome of SEQ ID NO:94, SEQ ID NO:95, SEQ ID NO:96, or SEQ ID NO:97 (the amino acid sequences of the respective M2-1 proteins are disclosed in SEQ ID NO:42-49; see also Table 16). In certain embodiments of the invention, the protein of a mammalian MPV is a M2-2 protein, wherein the M2-2 protein is at least 60%, at least 65%, at least 70%, at least 75%, at least 80%, at least 85%, at least 90%, at least 95%, at least 98%, at least 99%, or at least 99.5% identical to the amino acid sequence of a M2-2 protein encoded by the viral genome of SEQ ID NO:94, SEQ ID NO:95, SEQ ID NO:96, or SEQ ID NO:97 (the amino acid sequences of the respective M2-2 proteins are disclosed in SEQ ID NO:50-57; see also Table 16). In certain embodiments of the invention, the protein of a mammalian MPV is a G protein, wherein the G protein is at least 60%, at least 65%, at least 70%, at least 75%, at least 80%, at least 85%, at least 90%, at least 95%, at least 98%, at least 99%, or at least 99.5% identical to the amino acid sequence of a G protein encoded by the viral genome of SEQ ID NO:94, SEQ ID NO:95, SEQ ID NO:96, or SEQ ID NO:97 (the amino acid sequences of the respective G proteins are disclosed in SEQ ID NO:26-33; see also Table 16). In certain embodiments of the invention, the protein of a mammalian MPV is a SH protein, wherein the SH protein is at least 60%, at least 65%, at least 70%, at least 75%, at least 80%, at least 85%, at least 90%, at least 95%, at least 98%, at least 99%, or at least 99.5% identical to the amino acid sequence of a SH protein encoded by the viral genome of SEQ ID NO:94, SEQ ID NO:95, SEQ ID NO:96, or SEQ ID NO:97 (the amino acid sequences of the respective SH proteins are disclosed in SEQ ID NO:86-93; see also Table 16). In certain embodiments of the invention, the protein of a mammalian MPV is a L protein, wherein the L protein is at least 60%, at least 65%, at least 70%, at least 75%, at least 80%, at least 85%, at least 90%, at least 95%, at least 98%, at least 99%, or at least 99.5% identical to the amino acid sequence of a L protein encoded by the viral genome of SEQ ID NO:94, SEQ ID NO:95, SEQ ID NO:96, or SEQ ID NO:97 (the amino acid sequences of the respective L proteins are disclosed in SEQ ID NO:34-41; see also Table 16).

[0137] A fragment of a protein of mammalian MPV is at least 60%, at least 65%, at least 70%, at least 75%, at least 80%, at least 85%, at least 90%, at least 95%, at least 98%, at least 99%, or at least 99.5% identical to the homologous protein encoded by the virus of SEQ ID NO:94, SEQ ID NO:95, SEQ ID NO:96, or SEQ ID NO:97 over the portion of the protein that is homologous to the fragment. In a specific, illustrative embodiment, the invention provides a fragment of the F protein of a mammalian MPV that contains the ectodomain of the F protein and homologs thereof. The homolog of the fragment of the F protein that contains the ectodomain is at least 60%, at least 65%, at least 70%, at least 75%, at least 80%, at least 85%, at least 90%, at least 95%, at least 98%, at least 99%, or at least 99.5% identical to the corresponding fragment containing the ectodomain of the F protein encoded by a virus of SEQ ID NO:94, SEQ ID NO:95, SEQ ID NO:96, or SEQ ID NO:97 (the amino acid sequences of the respective F proteins are disclosed in SEQ ID NO:18-25; see also Table 16).

[0138] In certain embodiments, the invention provides a protein of a mammalian MPV of subgroup A and fragments thereof. The invention provides a N protein of a mammalian MPV of subgroup A, wherein the N protein is phylogenetically closer related to the N protein encoded by a virus of SEQ ID NO:95 or SEQ ID NO:96 than it is related to the N protein encoded by a virus encoded by SEQ ID NO:94 or SEQ ID NO:97. The invention provides a G protein of a mammalian MPV of subgroup A, wherein the G protein is phylogenetically closer related to the G protein encoded by a virus of SEQ ID NO:95 or SEQ ID NO:96 than it is related to the G protein encoded by a virus encoded by SEQ ID NO:94 or SEQ ID NO:97. The invention provides a P protein of a mammalian MPV of subgroup A, wherein the P protein is phylogenetically closer related to the P protein encoded by a virus of SEQ ID NO:95 or SEQ ID NO:96 than it is related to the P protein encoded by a virus encoded by SEQ ID NO:94 or SEQ ID NO:97. The invention provides a M protein of a mammalian MPV of subgroup A, wherein the M protein is phylogenetically closer related to the M protein encoded by a virus of SEQ ID NO:95 or SEQ ID NO:96 than it is related to the M protein encoded by a virus encoded by SEQ ID NO:94 or SEQ ID NO:97. The invention provides a N protein of a mammalian MPV of subgroup A, wherein the F protein is phylogenetically closer related to the F protein encoded by a virus of SEQ ID NO:95 or SEQ ID NO:96 than it is related to the F protein encoded by a virus encoded by SEQ ID NO:94 or SEQ ID NO:97. The invention provides a M2-1 protein of a mammalian MPV of subgroup A, wherein the M2-1 protein is phylogenetically closer related to the M2-1 protein encoded by a virus of SEQ ID NO:95 or SEQ ID NO:96 than it is related to the M2-1 protein encoded by a virus encoded by SEQ ID NO:94 or SEQ ID NO:97. The invention provides a M2-2 protein of a mammalian MPV of subgroup A, wherein the M2-2 protein is phylogenctically closer related to the M2-2 protein encoded by a virus of SEQ ID NO:95 or SEQ ID NO:96 than it is related to the M2-2 protein encoded by a virus encoded by SEQ ID NO:94 or SEQ ID NO:97. The invention provides a SH protein of a mammalian MPV of subgroup A, wherein the SH protein is phylogenetically closer related to the SH protein encoded by a virus of SEQ ID NO:95 or SEQ ID NO:96 than it is related to the SH protein encoded by a virus encoded by SEQ ID NO:94 or SEQ ID NO:97. The invention provides a L protein of a mammalian MPV of subgroup A, wherein the L protein is phylogenetically closer related to the L protein encoded by a virus of SEQ ID NO:95 or SEQ ID NO:96 than it is related to the L protein encoded by a virus encoded by SEQ ID NO:94 or SEQ ID NO:97.

[0139] In other embodiments, the invention provides a protein of a mammalian MPV of subgroup B or fragments thereof. The invention provides a N protein of a mammalian MPV of subgroup B, wherein the N protein is phylogenetically closer related to the N protein encoded by a virus of SEQ ID NO:94 or SEQ ID NO:97 than it is related to the N protein encoded by a virus encoded by SEQ ID NO:95 or SEQ ID NO:96. The invention provides a G protein of a mammalian MPV of subgroup A, wherein the G protein is phylogenetically closer related to the G protein encoded by a virus of SEQ ID NO:94 or SEQ ID NO:97 than it is related to the G protein encoded by a virus encoded by SEQ ID NO:95 or SEQ ID NO:96. The invention provides a P protein of a mammalian MPV of subgroup A, wherein the P protein is phylogenetically closer related to the P protein encoded by a virus of SEQ ID NO:94 or SEQ ID NO:97 than it is related to the P protein encoded by a virus encoded by SEQ ID NO:95 or SEQ ID NO:96. The invention provides a M protein of a mammalian MPV of subgroup A, wherein the M protein is phylogenetically closer related to the M protein encoded by a virus of SEQ ID NO:94 or SEQ ID NO:97 than it is related to the M protein encoded by a virus encoded by SEQ ID NO:95 or SEQ ID NO:96. The invention provides a N protein of a mammalian MPV of subgroup A, wherein the F protein is phylogenetically closer related to the F protein encoded by a virus of SEQ ID NO:94 or SEQ ID NO:97 than it is related to the F protein encoded by a virus encoded by SEQ ID NO:95 or SEQ ID NO:96. The invention provides a M2-1 protein of a mammalian MPV of subgroup A, wherein the M2-1 protein is phylogenetically closer related to the M2-1 protein encoded by a virus of SEQ ID NO:94 or SEQ ID NO:97 than it is related to the M2-1 protein encoded by a virus encoded by SEQ ID NO:95 or SEQ ID NO:96. The invention provides a M2-2 protein of a mammalian MPV of subgroup A, wherein the M2-2 protein is phylogenetically closer related to the M2-2 protein encoded by a virus of SEQ ID NO:94 or SEQ ID NO:97 than it is related to the M2-2 protein encoded by a virus encoded by SEQ ID NO:95 or SEQ ID NO:96. The invention provides a SH protein of a mammalian MPV of subgroup A, wherein the SH protein is phylogenetically closer related to the SH protein encoded by a virus of SEQ ID NO:94 or SEQ ID NO:97 than it is related to the SH protein encoded by a virus encoded by SEQ ID NO:95 or SEQ ID NO:96. The invention provides a L protein of a mammalian MPV of subgroup A, wherein the L protein is phylogenetically closer related to the L protein encoded by a virus of SEQ ID NO:94 or SEQ ID NO:97 than it is related to the L protein encoded by a virus encoded by SEQ ID NO:95 or SEQ ID NO:96.

[0140] The invention provides a G protein of a mammalian MPV variant B1, wherein the G protein of a mammalian MPV variant B1 is phylogenetically closer related to the G protein of the prototype of variant B1, isolate NL/1/99, than it is related to the G protein of the prototype of variant A1, isolate NL/1/00, the G protein of the prototype of A2, isolate NL/17/00, or the G protein of the prototype of B2, isolate NL/1/94. The invention provides a G protein of a mammalian MPV variant B1, wherein the amino acid sequence of the G protein is at least 66%, at least 70%, at least 75%, at least 80%, at least 85%, at least 90%, at least 95%, at least 98%, or at least 99% or at least 99.5% identical to the G protein of a mammalian MPV variant B1 as represented by the prototype NL/1/99 (SEQ ID NO:28). In a specific embodiment, the G protein of a mammalian MPV has the amino acid sequence of SEQ ID NO:119-153. The invention provides a N protein of a mammalian MPV variant B1, wherein the N protein of a mammalian MPV variant B1 is phylogenetically closer related to the N protein of the prototype of variant B1, isolate NL/1/99, than it is related to the N protein of the prototype of variant A1, isolate NL/1/00, the N protein of the prototype of A2, isolate NL/17/00, or the N protein of the prototype of B2, isolate NL/1/94. The invention provides a N protein of a mammalian MPV variant B1, wherein the amino acid sequence of the N proteint is at least 98.5% or at least 99% or at least 99.5% identical to the N protein of a mammalian MPV variant B1 as represented by the prototype NL/1/99 (SEQ ID NO:72). The invention provides a P protein of a mammalian MPV variant B1, wherein the P protein of a mammalian MPV variant B1 is phylogenetically closer related to the P protein of the prototype of variant B1, isolate NL/1/99, than it is related to the P protein of the prototype of variant A1, isolate NL/1/00, the P protein of the prototype of A2, isolate NL/17/00, or the P protein of the prototype of B2, isolate NL/1/94. The invention provides a P protein of a mammalian MPV variant B1, wherein the amino acid sequence of the P protein is at least 96%, at least 98%, or at least 99% or at least 99.5% identical the P protein of a mammalian MPV variant B1 as represented by the prototype NL/1/99 (SEQ ID NO:80). The invention provides a M protein of a mammalian MPV variant B1, wherein the M protein of a mammalian MPV variant B1 is phylogenetically closer related to the M protein of the prototype of variant B1, isolate NL/1/99, than it is related to the M protein of the prototype of variant A1, isolate NL/1/00, the M protein of the prototype of A2, isolate NL/17/00, or the M protein of the prototype of B2, isolate NL/1/94. The invention provides a M protein of a mammalian MPV variant B1, wherein the amino acid sequence of the M protein is identical to the M protein of a mammalian MPV variant B1 as represented by the prototype NL/1/99 (SEQ ID NO:64). The invention provides a F protein of a mammalian MPV variant B1, wherein the F protein of a mammalian MPV variant B1 is phylogenetically closer related to the F protein of variant B1, isolate NL/1/99, than it is related to the F protein of variant A1, isolate NL/1/00, the F protein of prototype A2, isolate NL/17/00, or the F protein of the prototype of B2, isolate NL/1/94. The invention provides a F protein of mammalian MPV variant B1, wherein the amino acid sequence of the F protein is identical at least 99% identical, to the F protein of a mammalian MPV variant B1 as represented by the prototype NL/1/99 (SEQ ID NO:20). In a specific embodiment, the F protein of a mammalian MPV has the amino acid sequence of SEQ ID NO: 248-327. The invention provides a M2-1 protein of a mammalian MPV variant B1, wherein the M2-1 protein of a mammalian MPV variant B1 is phylogenetically closer related to the M2-1 protein of the prototype of variant B1, isolate NL/1/99, than it is related to the M2-1 protein of the prototype of variant A1, isolate NL/1/00, the M2-1 protein of the prototype of A2, isolate NL/17/00, or the M2-1 protein of the prototype of B2, isolate NL/1/94. The invention provides a M2-1 protein of a mammalian MPV variant B1, wherein the amino acid sequence of the M2-1 protein is at least 98% or at least 99% or at least 99.5% identical the M2-1 protein of a mammalian MPV variant B1 as represented by the prototype NL/1/99 (SEQ ID NO:44). The invention provides a M2-2 protein of a mammalian MPV variant B1, wherein the M2-2 protein of a mammalian MPV variant B1 is phylogenetically closer related to the M2-2 protein of the prototype of variant B1, isolate NL/1/99, than it is related to the M2-2 protein of the prototype of variant A1, isolate NL/1/00, the M2-2 protein of the prototype of A2, isolate NL/17/00, or the M2-2 protein of the prototype of B2, isolate NL/1/94. The invention provides a M2-2 protein of a mammalian MPV variant B1, wherein the amino acid sequence of the M2-2 protein is at least 99%or at least 99.5% identical the M2-2 protein of a mammalian MPV variant B1 as represented by the prototype NL/1/99 (SEQ ID NO:52). The invention provides a SH protein of a mammalian MPV variant B1, wherein the SH protein of a mammalian MPV variant B1 is phylogenetically closer related to the SH protein of the prototype of variant B1, isolate NL/1/99, than it is related to the SH protein of the prototype of variant A1, isolate NL/1/00, the SH protein of the prototype of A2, isolate NL/17/00, or the SH protein of the prototype of B2, isolate NL/1/94. The invention provides a SH protein of a mammalian MPV variant B1, wherein the amino acid sequence of the SH protein is at least 83%, at least 85%, at least 90%, at least 95%, at least 98%, or at least 99% or at least 99.5% identical the SH protein of a mammalian MPV variant B1 as represented by the prototype NL/1/99 (SEQ ID NO:88). The invention provides a L protein of a mammalian MPV variant B1, wherein the L protein of a mammalian MPV variant B1 is phylogenetically closer related to the L protein of the prototype of variant B1, isolate NL/1/99, than it is related to the L protein of the prototype of variant A1, isolate NL/1/00, the L protein of the prototype of A2, isolate NL/17/00, or the L protein of the prototype of B2, isolate NL/1/94. The invention provides a L protein of a mammalian MPV variant B1, wherein the amino acid sequence of the L protein is at least 99% or at least 99.5% identical the L protein a mammalian MPV variant B1 as represented by the prototype NL/1/99 (SEQ ID NO:36).

[0141] The invention provides a G protein of a mammalian MPV variant A1, wherein the G protein of a mammalian MPV variant A1 is phylogenetically closer related to the G protein of the prototype of variant A1, isolate NL/1/00, than it is related to the G protein of the prototype of variant B1, isolate NL/1/99, the G protein of the prototype of A2, isolate NL/17/00, or the G protein of the prototype of B2, isolate NL/1/94. The invention provides a G protein of a mammalian MPV variant A1, wherein the amino acid sequence of the G protein is at least 66%, at least 70%, at least 75%, at least 80%, at least 85%, at least 90%, at least 95%, at least 98%, or at least 99% or at least 99.5% identical to the G protein of a mammalian MPV variant A1 as represented by the prototype NL/1/00 (SEQ ID NO:26). The invention provides a N protein of a mammalian MPV variant A1, wherein the N protein of a mammalian MPV variant A1 is phylogenetically closer related to the N protein of the prototype of variant A1, isolate NL/1/00, than it is related to the N protein of the prototype of variant B1, isolate NL/1/99, the N protein of the prototype of A2, isolate NL/17/00, or the N protein of the prototype of B2, isolate NL/1/94. The invention provides a N protein of a mammalian MPV variant A1, wherein the amino acid sequence of the N protein is at least 99.5% identical to the N protein of a mammalian MPV variant A1 as represented by the prototype NL/1/00 (SEQ IF NO:70). The invention provides a P protein of a mammalian MPV variant A1, wherein the P protein of a mammalian MPV variant A1 is phylogenetically closer related to the P protein of the prototype of variant A1, isolate NL/1/00, than it is related to the P protein of the prototype of variant B1, isolate NL/1/99, the P protein of the prototype of A2, isolate NL/17/00, or the P protein of the prototype of B2, isolate NL/1/94. The invention provides a P protein of a mammalian MPV variant A1, wherein the amino acid sequence of the P protein is at least 96%, at least 98%, or at least 99% or at least 99.5% identical to the P protein of a mammalian MPV variant A1 as represented by the prototype NL/1/00 (SEQ ID NO:78). The invention provides a M protein of a mammalian MPV variant A1, wherein the M protein of a mammalian MPV variant A1 is phylogenetically closer related to the M protein of the prototype of variant A1, isolate NL/1/00, than it is related to the M protein of the prototype of variant B1, isolate NL/1/99, the M protein of the prototype of A2, isolate NL/17/00, or the M protein of the prototype of B2, isolate NL/1/94. The invention provides a M protein of a mammalian MPV variant A1, wherein the amino acid sequence of the M protein is at least 99% or at least 99.5% identical to the M protein of a mammalian MPV variant A1 as represented by the prototype NL/1/00 (SEQ ID NO:62). The invention provides a F protein of a mammalian MPV variant A1, wherein the F protein of a mammalian MPV variant A1 is phylogenetically closer related to the F protein of the prototype of variant A1, isolate NL/1/00, than it is related to the F protein of the prototype of variant B1, isolate NL/1/99, the F protein of the prototype of A2, isolate NL/17/00, or the F protein of the prototype of B2, isolate NL/1/94. The invention provides a F protein of a mammalian MPV variant A1, wherein the amino acid sequence of the F protein is at least 98% or at least 99% or at least 99.5% identical to the F protein of a mammalian MPV variant A1 as represented by the prototype NL/1/00 (SEQ ID NO:18). The invention provides a M2-1 protein of a mammalian MPV variant A1, wherein the M2-1 protein of a mammalian MPV variant A1 is phylogenetically closer related to the M2-1 protein of the prototype of variant A1, isolate NL/1/00, than it is related to the M2-1 protein of the prototype of variant B1, isolate NL/1/99, the M2-1 protein of the prototype of A2, isolate NL/17/00, or the M2-1 protein of the prototype of B2, isolate NL/1/94. The invention provides a M2-1 protein of a mammalian MPV variant A1, wherein the amino acid sequence of the M2-1 protein is at least 99% or at least 99.5% identical to the M2-1 protein of a mammalian MPV variant A1 as represented by the prototype NL/1/00 (SEQ ID NO:42). The invention provides a M2-2 protein of a mammalian MPV variant A1, wherein the M2-2 protein of a mammalian MPV variant A1 is phylogenetically closer related to the M2-2 protein of the prototype of variant A1, isolate NL/1/00, than it is related to the M2-2 protein of the prototype of variant B1, isolate NL/1/99, the M2-2 protein of the prototype of A2, isolate NL/17/00, or the M2-2 protein of the prototype of B2, isolate NL/1/94. The invention provides a M2-2 protein of a mammalian MPV variant A1, wherein the amino acid sequence of the M2-2 protein is at least 96% or at least 99% or at least 99.5% identical to the M2-2 protein of a mammalian MPV variant A1 as represented by the prototype NL/1/00 (SEQ ID NO:50). The invention provides a SH protein of a mammalian MPV variant A1, wherein the SH protein of a mammalian MPV variant A1 is phylogenetically closer related to the SH protein of the prototype of variant A1, isolate NL/1/00, than it is related to the SH protein of the prototype of variant B1, isolate NL/1/99, the SH protein of the prototype of A2, isolate NL/17/00, or the SH protein of the prototype of B2, isolate NL/1/94. The invention provides a SH protein of a mammalian MPV variant A1, wherein the amino acid sequence of the SH protein is at least 84%, at least 90%, at least 95%, at least 98%, or at least 99% or at least 99.5% identical to the SH protein of a mammalian MPV variant A1 as represented by the prototype NL/1/00 (SEQ ID NO:86). The invention provides a L protein of a mammalian MPV variant A1, wherein the L protein of a mammalian MPV variant A1 is phylogenetically closer related to the L protein of the prototype of variant A1, isolate NL/1/00, than it is related to the L protein of the prototype of variant B1, isolate NL/1/99, the L protein of the prototype of A2, isolate NL/17/00, or the L protein of the prototype of B2, isolate NL/1/94. The invention provides a L protein of a mammalian MPV variant A1, wherein the amino acid sequence of the L protein is at least 99% or at least 99.5% identical to the L protein of a virus of a mammalian MPV variant A1 as represented by the prototype NL/1/00 (SEQ ID NO:34).

[0142] The invention provides a G protein of a mammalian MPV variant A2, wherein the G protein of a mammalian MPV variant A2 is phylogenetically closer related to the G protein of the prototype of variant A2, isolate NL/17/00, than it is related to the G protein of the prototype of variant B1, isolate NL/1/99, the G protein of the prototype of A1, isolate NL/1/00, or the G protein of the prototype of B2, isolate NL/1/94. The invention provides a G protein of a mammalian MPV variant A2, wherein the amino acid sequence of the G protein is at least 66%, at least 70%, at least 75%, at least 80%, at least 85%, at least 90%, at least 95%, at least 98%, at least 99% or at least 99.5% identical to the G protein of a mammalian MPV variant A2 as represented by the prototype NL/17/00 (SEQ ID NO:27). The invention provides a N protein of a mammalian MPV variant A2, wherein the N protein of a mammalian MPV variant A2 is phylogenetically closer related to the N protein of the prototype of variant A2, isolate NL/17/00, than it is related to the N protein of the prototype of variant B1, isolate NL/1/99, the N protein of the prototype of A1, isolate NL/1/00, or the N protein of the prototype of B2, isolate NL/1/94. The invention provides a N protein of a mammalian MPV variant A2, wherein the amino acid sequence of the N protein at least 99.5% identical to the N protein of a mammalian MPV variant A2 as represented by the prototype NL/17/00 (SEQ ID NO:71). The invention provides a P protein of a mammalian MPV variant A2, wherein the P protein of a mammalian MPV variant A2 is phylogenetically closer related to the P protein of the prototype of variant A2, isolate NL/17/00, than it is related to the P protein of the prototype of variant B1, isolate NL/1/99, the P protein of the prototype of A1, isolate NL/1/00, or the P protein of the prototype of B2, isolate NL/1/94. The invention provides a P protein of a mammalian MPV variant A2, wherein the amino acid sequence of the P protein is at least 96%, at least 98%, at least 99% or at least 99.5% identical to the P protein of a mammalian MPV variant A2 as represented by the prototype NL/17/00 (SEQ ID NO:79). The invention provides a M protein of a mammalian MPV variant A2, wherein the M protein of a mammalian MPV variant A2 is phylogenetically closer related to the M protein of the prototype of variant A2, isolate NL/17/00, than it is related to the M protein of the prototype of variant B I, isolate NL/1/99, the M protein of the prototype of A1, isolate NL/1/00, or the M protein of the prototype of B2, isolate NL/1/94. The invention provides a M protein of a mammalian MPV variant A2, wherein the the amino acid sequence of the M protein is at least 99%, or at least 99.5% identical to the M protein of a mammalian MPV variant A2 as represented by the prototype NL/17/00 (SEQ ID NO:63). The invention provides a F protein of a mammalian MPV variant A2, wherein the F protein of a mammalian MPV variant A2 is phylogenetically closer related to the F protein of the prototype of variant A2, isolate NL/17/00, than it is related to the F protein of the prototype of variant B1, isolate NL/1/99, the F protein of the prototype of A1, isolate NL/1/00, or the F protein of the prototype of B2, isolate NL/1/94. The invention provides a F protein of a mammalian MPV variant A2, wherein the amino acid sequence of the F protein is at least 98%, at least 99% or at least 99.5% identical to the F protein of a mammalian MPV variant A2 as represented by the prototype NL/17/00 (SEQ ID NO:19). The invention provides a M2-1 protein of a mammalian MPV variant A2, wherein the M2-1 protein of a mammalian MPV variant A2 is phylogenetically closer related to the M2-1 protein of the prototype of variant A2, isolate NL/17/00, than it is related to the M2-1 protein of the prototype of variant B1, isolate NL/1/99, the M2-1 protein of the prototype of A1, isolate NL/1/00, or the M2-1 protein of the prototype of B2, isolate NL/1/94. The invention provides a M2-1 protein of a mammalian MPV variant A2, wherein the amino acid sequence of the M2-1 protein is at least 99%, or at least 99.5% identical to the M2-1 protein of a mammalian MPV variant A2 as represented by the prototype NL/17/00 (SEQ ID NO: 43). The invention provides a M2-2 protein of a mammalian MPV variant A2, wherein the M2-2 protein of a mammalian MPV variant A2 is phylogenetically closer related to the M2-2 protein of the prototype of variant A2, isolate NL/17/00, than it is related to the M2-2 protein of the prototype of variant B1, isolate NL/1/99, the M2-2 protein of the prototype of A1, isolate NL/1/00, or the M2-2 protein of the prototype of B2, isolate NL/1/94. The invention provides a M2-2 protein of a mammalian MPV variant A2, wherein the amino acid sequence of the M2-2 protein is at least 96%, at least 98%, at least 99% or at least 99.5% identical to the M2-2 protein of a mammalian MPV variant A2 as represented by the prototype NL/17/00 (SEQ ID NO:51). The invention provides a SH protein of a mammalian MPV variant A2, wherein the SH protein of a mammalian MPV variant A2 is phylogenetically closer related to the SH protein of the prototype of variant A2, isolate NL/17/00, than it is related to the SH protein of the prototype of variant B1, isolate NL/1/99, the SH protein of the prototype of A1, isolate NL/1/00, or the SH protein of the prototype of B2, isolate NL/1/94. The invention provides a SH protein of a mammalian MPV variant A2, wherein the amino acid sequence of the SH protein is at least 84%, at least 85%, at least 90%, at least 95%, at least 98%, at least 99% or at least 99.5% identical to the SH protein of a mammalian MPV variant A2 as represented by the prototype NL/17/00(SEQ ID NO:87). The invention provides a L protein of a mammalian MPV variant A2, wherein the L protein of a mammalian MPV variant A2 is phylogenetically closer related to the L protein of the prototype of variant A2, isolate NL/17/00, than it is related to the L protein of the prototype of variant B1, isolate NL/1/99, the L protein of the prototype of A1, isolate NL/1/00, or the L protein of the prototype of B2, isolate NL/1/94. The invention provides a L protein of a mammalian MPV variant A2, wherein the amino acid sequence of the L protein is at least 99% or at least 99.5% identical to the L protein of a mammalian MPV variant A2 as represented by the prototype NL/17/00 (SEQ ID NO:35).

[0143] The invention provides a G protein of a mammalian MPV variant B2, wherein the G protein of a mammalian MPV variant B2 is phylogenetically closer related to the G protein of the prototype of variant B2, isolate NL/1/94, than it is related to the G protein of the prototype of variant B1, isolate NL/1/99, the G protein of the prototype of A1, isolate NL/1/00, or the G protein of the prototype of A2, isolate NL/17/00. The invention provides a G protein of a mammalian MPV variant B2, wherein the amino acid sequence of the G protein is at least 66%, at least 70%, at least 75%, at least 80%, at least 85%, at least 90%, at least 95%, at least 98%, or at least 99% or at least 99.5% identical to the G protein of a mammalian MPV variant B2 as represented by the prototype NL/1/94 (SEQ ID NO:29). The invention provides a N protein of a mammalian MPV variant B2, wherein the N protein of a mammalian MPV variant B2 is phylogenetically closer related to the N protein of the prototype of variant B2, isolate NL/1/94, than it is related to the N protein of the prototype of variant B1, isolate NL/1/99, the N protein of the prototype of A1, isolate NL/1/00, or the N protein of the prototype of A2, isolate NL/17/00. The invention provides a N protein of a mammalian MPV variant B2, wherein the amino acid sequence of the N protein is at least 99% or at least 99.5% identical to the N protein of a mammalian MPV variant B2 as represented by the prototype NL/1/94 (SEQ ID NO:73). The invention provides a P protein of a mammalian MPV variant B2, wherein the P protein of a mammalian MPV variant B2 is phylogenetically closer related to the P protein of the prototype of variant B2, isolate NL/1/94, than it is related to the P protein of the prototype of variant B1, isolate NL/1/99, the P protein of the prototype of A1, isolate NL/1/00, or the P protein of the prototype of A2, isolate NL/17/00. The invention provides a P protein of a mammalian MPV variant B2, wherein the amino acid sequence of the P protein is at least 96%, at least 98%, or at least 99% or at least 99.5% identical to the P protein of a mammalian MPV variant B2 as represented by the prototype NL/1/94 (SEQ ID NO:81). The invention provides a M protein of a mammalian MPV variant B2, wherein the M protein of a mammalian MPV variant B2 is phylogenetically closer related to the M protein of the prototype of variant B2, isolate NL/1/94, than it is related to the M protein of the prototype of variant B1, isolate NL/1/99, the M protein of the prototype of A1, isolate NL/1/00, or the M protein of the prototype of A2, isolate NL/17/00. The invention provides a M protein of a mammalian MPV variant B2, wherein the amino acid sequence of its M protein is identical to the M protein of a mammalian MPV variant B2 as represented by the prototype NL/1/94 (SEQ ID NO:65). The invention provides a F protein of a mammalian MPV variant B2, wherein the F protein of a mammalian MPV variant B2 is phylogenetically closer related to the F protein of the prototype of variant B2, isolate NL/1/94, than it is related to the F protein of the prototype of variant B1, isolate NL/1/99, the F protein of the prototype of A1, isolate NL/1/00, or the F protein of the prototype of A2, isolate NL/17/00. The invention provides a F protein of a mammalian MPV variant B2, wherein the amino acid sequence of the F protein is at least 99% or at least 99.5% identical to the F protein of a mammalian MPV variant B2 as represented by the prototype NL/1/94(SEQ ID NO:21). The invention provides a M2-1 protein of a mammalian MPV variant B2, wherein the M2-1 protein of a mammalian MPV variant B2 is phylogenetically closer related to the M2-1 protein of the prototype of variant B2, isolate NL/1/94, than it is related to the M2-1 protein of the prototype of variant B1, isolate NL/1/99, the M2-1 protein of the prototype of A1, isolate NL/1/00, or the M2-1 protein of the prototype of A2, isolate NL/17/00. The invention provides a M2-1 protein of a mammalian MPV variant B2, wherein the amino acid sequence of the M2-1 protein is at least 98% or at least 99% or at least 99.5% identical to the M2-1 protein of a mammalian MPV variant B2 as represented by the prototype NL/1/94 (SEQ ID NO:45). The invention provides a M2-2 protein of a mammalian MPV variant B2, wherein the M2-2 protein of a mammalian MPV variant B2 is phylogenetically closer related to the M2-2 protein of the prototype of variant B2, isolate NL/1/94, than it is related to the M2-2 protein of the prototype of variant B1, isolate NL/1/99, the M2-2 protein of the prototype of A1, isolate NL/1/00, or the M2-2 protein of the prototype of A2, isolate NL/17/00. The invention provides a M2-2 protein of a mammalian MPV variant B2, wherein the amino acid sequence is at least 99% or at least 99.5% identical to the M2-2 protein of a mammalian MPV variant B2 as represented by the prototype NL/1/94 (SEQ ID NO:53). The invention provides a SH protein of a mammalian MPV variant B2, wherein the SH protein of a mammalian MPV variant B2 is phylogenetically closer related to the SH protein of the prototype of variant B2, isolate NL/1/94, than it is related to the SH protein of the prototype of variant B1, isolate NL/1/99, the SH protein of the prototype of A1, isolate NL/1/00, or the SH protein of the prototype of A2, isolate NL/17/00. The invention provides a SH protein of a mammalian MPV variant B2, wherein the amino acid sequence of the SH protein is at least 84%, at least 85%, at least 90%, at least 95%, at least 98%, or at least 99% or at least 99.5% identical to the SH protein of a mammalian MPV variant B2 as represented by the prototype NL/1/94 (SEQ ID NO:89). The invention provides a L protein of a mammalian MPV variant B2, wherein the L protein of a mammalian MPV variant B2 is phylogenetically closer related to the L protein of the prototype of variant B2, isolate NL/1/94, than it is related to the L protein of the prototype of variant B1, isolate NL/1/99, the L protein of the prototype of A1, isolate NL/1/00, or the L protein of the prototype of A2, isolate NL/17/00. The invention provides a L protein of a mammalian MPV variant B2, wherein the and/or if the amino acid sequence of the L protein is at least 99% or at least 99.5% identical to the L protein of a mammalian MPV variant B2 as represented by the prototype NL/1/94 (SEQ ID NO:37).

[0144] In certain embodiments, the percentage of sequence identity is based on an alignment of the full length proteins. In other embodiments, the percentage of sequence identity is based on an alignment of contiguous amino acid sequences of the proteins, wherein the amino acid sequences can be 25 amino acids, 50 amino acids, 75 amino acids, 100 amino acids, 125 amino acids, 150 amino acids, 175 amino acids, 200 amino acids, 225 amino acids, 250 amino acids, 275 amino acids, 300 amino acids, 325 amino acids, 350 amino acids, 375 amino acids, 400 amino acids, 425 amino acids, 450 amino acids, 475 amino acids, 500 amino acids, 750 amino acids, 1000 amino acids, 1250 amino acids, 1500 amino acids, 1750 amino acids, 2000 amino acids or 2250 amino acids in length.

[0145] The invention further provides nucleic acid sequences derived from a mammalian MPV. The invention also provides derivatives of nucleic acid sequences derived from a mammalian MPV. In certain specific embodiments the nucleic acids are modified.

[0146] In certain embodiments, a nucleic acid of the invention encodes a G protein, a N protein, a P protein, a M protein, a F protein, a M2-1 protein, a M2-2 protein, a SH protein, or a L protein of a mammalian MPV as defined above. In certain embodiments, a nucleic acid of the invention encodes a G protein, a N protein, a P protein, a M protein, a F protein, a M2-1 protein, a M2-2 protein, a SH protein, or a L protein of subgroup A of a mammalian MPV as defined above. In a specific embodiment, the G gene of a mammalian MPV has the nucleotide sequence of SEQ ID NO:98-132. In a specific embodiment, the F gene of a mammalian MPV has the nucleotide sequence of SEQ ID NO:168-247. In certain embodiments, a nucleic acid of the invention encodes a G protein, a N protein, a P protein, a M protein, a F protein, a M2-1 protein, a M2-2 protein, a SH protein, or a L protein of subgroup B of a mammalian MPV as defined above. In certain embodiments, a nucleic acid of the invention encodes a G protein, a N protein, a P protein, a M protein, a F protein, a M2-1 protein, a M2-2 protein, a SH protein, or a L protein of variant A1 of a mammalian MPV as defined above. In certain embodiments, a nucleic acid of the invention encodes a G protein, a N protein, a P protein, a M protein, a F protein, a M2-1 protein, a M2-2 protein, a SH protein, or a L protein of variant A2 of a mammalian MPV as defined above. In certain embodiments, a nucleic acid of the invention encodes a G protein, a N protein, a P protein, a M protein, a F protein, a M2-1 protein, a M2-2 protein, a SH protein, or a L protein of variant B1 of a mammalian MPV as defined above. In certain embodiments, a nucleic acid of the invention encodes a G protein, a N protein, a P protein, a M protein, a F protein, a M2-1 protein, a M2-2 protein, a SH protein, or a L protein of variant B2 of a mammalian MPV as defined above.

[0147] In certain embodiments, the invention provides a nucleotide sequence that is at least 50%, at least 55%, at least 60%, at least 65%, at least 70%, at least 75%, at least 75%, at least 80%, at least 85%, at least 90%, at least 95%, at least 98%, at least 99%, or at least 99.5% identical to the nucleotide sequence of SEQ ID NO:94, SEQ ID NO:95, SEQ ID NO:96, or SEQ ID NO:97. In certain embodiments, the nucleic acid sequence of the invention, is at least 50%, at least 55%, at least 60%, at least 65%, at least 70%, at least 75%, at least 75%, at least 80%, at least 85%, at least 90%, at least 95%, at least 98%, at least 99%, or at least 99.5% identical to a fragment of the nucleotide sequence of SEQ ID NO:94, SEQ ID NO:95, SEQ ID NO:96, or SEQ ID NO:97, wherein the fragment is at least 25 nucleotides, at least 50 nucleotides, at least 75 nucleotides, at least 100 nucleotides, at least 150 nucleotides, at least 200 nucleotides, at least 250 nucleotides, at least 300 nucleotides, at least 400 nucleotides, at least 500 nucleotides, at least 750 nucleotides, at least 1,000 nucleotides, at least 1,250 nucleotides, at least 1,500 nucleotides, at least 1,750 nucleotides, at least 2,000 nucleotides, at least 2,00 nucleotides, at least 3,000 nucleotides, at least 4,000 nucleotides, at least 5,000 nucleotides, at least 7,500 nucleotides, at least 10,000 nucleotides, at least 12,500 nucleotides, or at least 15,000 nucleotides in length. In a specific embodiment, the nucleic acid sequence of the invention is at least 50%, at least 55%, at least 60%, at least 65%, at least 70%, at least 75%, at least 75%, at least 80%, at least 85%, at least 90%, at least 95%, at least 98%, at least 99%, or at least 99.5% or 100% identical to one of the nucleotide sequences of SEQ ID NO:98-132; SEQ ID NO:168-247; SEQ ID NO:22-25; SEQ ID NO:30-33; SEQ ID NO:38-41; SEQ ID NO:46-49; SEQ ID NO:54-57; SEQ ID NO:58-61; SEQ ID NO:66-69; SEQ ID NO:74-77; SEQ ID NO:82-85; or SEQ ID NO:90-93.

[0148] In specific embodiments of the invention, a nucleic acid sequence of the invention is capable of hybridizing under low stringency, medium stringency or high stringency conditions to one of the nucleic acid sequences of SEQ ID NO:94, SEQ ID NO:95, SEQ ID NO:96, or SEQ ID NO:97. In specific embodiments of the invention, a nucleic acid sequence of the invention is capable of hybridizing under low stringency, medium stringency or high stringency conditions to one of the nucleic acid sequences of SEQ ID NO:98-132; SEQ ID NO:168-247; SEQ ID NO:22-25; SEQ ID NO:30-33; SEQ ID NO:38-41; SEQ ID NO:46-49; SEQ ID NO:54-57; SEQ ID NO:58-61; SEQ ID NO:66-69; SEQ ID NO:74-77; SEQ ID NO:82-85; or SEQ ID NO:90-93. In certain embodiments, a nucleic acid hybridizes over a length of at least 25 nucleotides, at least 50 nucleotides, at least 75 nucleotides, at least 100 nucleotides, at least 150 nucleotides, at least 200 nucleotides, at least 250 nucleotides, at least 300 nucleotides, at least 400 nucleotides, at least 500 nucleotides, at least 750 nucleotides, at least 1,000 nucleotides, at least 1,250 nucleotides, at least 1,500 nucleotides, at least 1,750 nucleotides, at least 2,000 nucleotides, at least 2,00 nucleotides, at least 3,000 nucleotides, at least 4,000 nucleotides, at least 5,000 nucleotides, at least 7,500 nucleotides, at least 10,000 nucleotides, at least 12,500 nucleotides, or at least 15,000 nucleotides with the nucleotide sequence of SEQ ID NO:94, SEQ ID NO:95, SEQ ID NO:96, or SEQ ID NO:97.

[0149] The invention further provides antibodies and antigen-binding fragments that bind specifically to a protein of a mammalian MPV. An antibody of the invention binds specifically to a G protein, a N protein, a P protein, a M protein, a F protein, a M2-1 protein, a M2-2 protein, a SH protein, or a L protein of a mammalian MPV. In specific embodiments, the antibody is a human antibody or a humanized antibody. In certain embodiments, an antibody of the invention binds specifically to a G protein, a N protein, a P protein, a M protein, a F protein, a M2-1 protein, a M2-2 protein, a SH protein, or a L protein of a virus of subgroup A of a mammalian MPV. In certain other embodiments, an antibody of the invention binds specifically to a G protein, a N protein, a P protein, a M protein, a F protein, a M2-1 protein, a M2-2 protein, a SH protein, or a L protein of a virus of subgroup B of a mammalian MPV. In certain, more specific, embodiments, an antibody of the invention binds specifically to a G protein, a N protein, a P protein, a M protein, a F protein, a M2-1 protein, a M2-2 protein, a SH protein, or a L protein of a virus of variant A1 of a mammalian MPV. In other embodiments, the antibody of the invention binds specifically to a G protein, a N protein, a P protein, a M protein, a F protein, a M2-1 protein, a M2-2 protein, a SH protein, or a L protein of a virus of subgroup A2 of a mammalian MPV. In certain embodiments, an antibody of the invention binds specifically to a G protein, a N protein, a P protein, a M protein, a F protein, a M2-1 protein, a M2-2 protein, a SH protein, or a L protein of a virus of subgroup B1 of a mammalian MPV. In certain other embodiments, an antibody of the invention binds specifically to a G protein, a N protein, a P protein, a M protein, a F protein, a M2-1 protein, a M2-2 protein, a SH protein, or a L protein of a virus of subgroup B2 of a mammalian MPV.

[0150] 5.1.3. Insertion of the Heterologous Gene Sequence

[0151] Insertion of a foreign gene sequence into a viral vector of the invention can be accomplished by either a complete replacement of a viral coding region with a heterologous sequence, or by a partial replacement of the same, or by adding the heterologous nucleotide sequence to the viral genome. Complete replacement would probably best be accomplished through the use of PCR-directed mutagenesis. Briefly, PCR-primer A would contain, from the 5′ to 3′ end: a unique restriction enzyme site, such as a class IIS restriction enzyme site (i.e., a “shifter” enzyme; that recognizes a specific sequence but cleaves the DNA either upstream or downstream of that sequence); a stretch of nucleotides complementary to a region of the PIV gene; and a stretch of nucleotides complementary to the carboxy-terminus coding portion of the heterologous sequence. PCR-primer B would contain from the 5′ to 3′ end: a unique restriction enzyme site; a stretch of nucleotides complementary to a PIV gene; and a stretch of nucleotides corresponding to the 5′ coding portion of the foreign gene. After a PCR reaction using these primers with a cloned copy of the foreign gene, the product may be excised and cloned using the unique restriction sites. Digestion with the class IIS enzyme and transcription with the purified phage polymerase would generate an RNA molecule containing the exact untranslated ends of the PIV gene with a foreign gene insertion. In an alternate embodiment, PCR-primed reactions could be used to prepare double-stranded DNA containing the bacteriophage promoter sequence, and the hybrid gene sequence so that RNA templates can be transcribed directly without cloning.

[0152] A heterologous nucleotide sequence can be added or inserted at various positions of the virus of the invention. In one embodiment, the heterologous nucleotide sequence is added or inserted at position 1. In another embodiment, the heterologous nucleotide sequence is added or inserted at position 2. In another embodiment, the heterologous nucleotide sequence is added or inserted at position 3. In another embodiment, the heterologous nucleotide sequence is added or inserted at position 4. In another embodiment, the heterologous nucleotide sequence is added or inserted at position 5. In yet another embodiment, the heterologous nucleotide sequence is added or inserted at position 6. As used herein, the term “position” refers to the position of the heterologous nucleotide sequence on the viral genome to be transcribed, e.g., position 1 means that it is the first gene to be transcribed, and position 2 means that it is the second gene to be transcribed. Inserting heterologous nucleotide sequences at the lower-numbered positions of the virus generally results in stronger expression of the heterologous nucleotide sequence compared to insertion at higher-numbered positions due to a transcriptional gradient that occurs across the genome of the virus. However, the transcriptional gradient also yields specific ratios of viral mRNAs. Insertion of foreign genes will perturb these ratios and result in the synthesis of different amounts of viral proteins that may influence virus replication. Thus, both the transcriptional gradient and the replication kinetics must be considered when choosing an insertion site. For example, insertion of heterologous nucleotide sequence at position 2 of the b/h PIV3 vector results in the best replication rate and expression level of the heterologous gene. Inserting heterologous nucleotide sequences at lower-numbered positions is the preferred embodiment of the invention if strong expression of the heterologous nucleotide sequence is desired. In a preferred embodiment, the heterologous sequence is added or inserted at position 1, 2 or 3.

[0153] When inserting a heterologous nucleotide sequence into the virus of the invention, the intergenic region between the end of the coding sequence of the heterologous gene and the start of the coding sequence of the downstream gene can be altered to achieve a desired effect. As used herein, the term “intergenic region” refers to nucleotide sequence between the stop signal of one gene and the start codon (e.g., AUG) of the coding sequence of the next downstream open reading frame. An intergenic region may comprise a non-coding region of a gene, i.e., between the transcription start site and the start of the coding sequence (AUG) of the gene. This non-coding region occurs naturally in bPIV3 mRNAs and other viral genes, which is illustrated as non-limiting examples in Table 2:

TABLE 2
Lengths of Non-coding Regions for bPIV3 mRNAs

| CTT [Gene Start] | AUG |
|---|---|
| N | 45 nucleotides |
| P | 68 nucleotides |
| M | 21 nucleotides |
| F | 201 nucleotides |
| HN | 62 nucleotides |
| L | 12 nucleotides |
| b/h RSV F1 | 10 nucleotides |
| b/h RSV F2 | 86 nucleotides |
| b/h RSV F1 NP-P | 83 nucleotides |

[0154] In various embodiments, the intergenic region between the heterologous nucleotide sequence and the downstream gene can be engineered, independently from each other, to be at least 10 nt in length, at least 20 nt in length, at least 30 nt in length, at least 50 nt in length, at least 75 nt in length, at least 100 nt in length, at least 125 nt in length, at least 150 nt in length, at least 175 nt in length or at least 200 nt in length. In certain embodiments, the intergenic region between the heterologous nucleotide sequence and the downstream gene can be engineered, independently from each other, to be at most 10 nt in length, at most 20 nt in length, at most 30 nt in length, at most 50 nt in length, at most 75 nt in length, at most 100 nt in length, at most 125 nt in length, at most 150 nt in length, at most 175 nt in length or at most 200 nt in length. In various embodiments, the non-coding region of a desired gene in a virus genome can also be engineered, independently from each other, to be at least 10 nt in length, at least 20 nt in length, at least 30 nt in length, at least 50 nt in length, at least 75 nt in length, at least 100 nt in length, at least 125 nt in length, at least 150 nt in length, at least 175 nt in length or at least 200 nt in length. In certain embodiments, the non-coding region of a desired gene in a virus genome can also be engineered, independently from each other, to be at most 10 nt in length, at most 20 nt in length, at most 30 nt in length, at most 50 nt in length, at most 75 nt in length, at most 100 nt in length, at most 125 nt in length, at most 150 nt in length, at most 175 nt in length or at most 200 nt in length.

[0155] When inserting a heterologous nucleotide sequence, the positional effect and the intergenic region manipulation can be used in combination to achieve a desirable effect. For example, the heterologous nucleotide sequence can be added or inserted at a position selected from the group consisting of position 1, 2, 3, 4, 5, and 6, and the intergenic region between the heterologous nucleotide sequence and the next downstream gene can be altered (see Table 3). In an examplary embodiment, hRSV F gene is inserted at position 1 of a b/h PIV3 vector, and the intergenic region between F gene and N gene (i.e., the next downstream gene of F) is altered to 177 nucleotides. Many more combinations are encompassed by the present invention and some are shown by way of example in Table 3.

TABLE 3
Examples of mode of insertion of heterologous nucleotide sequences

| | | | | | | Po- |
|---|---|---|---|---|---|---|
| | | | | | | si- |
| | Position 1 | Position 2 | Position 3 | Position 4 | Position 5 | tion 6 |
| IGR^{a} | 10-20 | 10-20 | 10-20 | 10-20 | 10-20 | 10- |
| | | | | | | 20 |
| IGR | 21-40 | 21-40 | 21-40 | 21-40 | 21-40 | 21- |
| | | | | | | 40 |
| IGR | 41-60 | 41-60 | 41-60 | 41-60 | 41-60 | 41- |
| | | | | | | 60 |
| IGR | 61-80 | 61-80 | 61-80 | 61-80 | 61-80 | 61- |
| | | | | | | 80 |
| IGR | 81-100 | 81-100 | 81-100 | 81-100 | 81-100 | 81- |
| | | | | | | 100 |
| IGR | 101-120 | 101-120 | 101-120 | 101-120 | 101-120 | 101- |
| | | | | | | 120 |
| IGR | 121-140 | 121-140 | 121-140 | 121-140 | 121-140 | 121- |
| | | | | | | 140 |
| IGR | 141-160 | 141-160 | 141-160 | 141-160 | 141-160 | 141- |
| | | | | | | 160 |
| IGR | 161-180 | 161-180 | 161-180 | 161-180 | 161-180 | 161- |
| | | | | | | 180 |
| IGR | 181-200 | 181-200 | 181-200 | 181-200 | 181-200 | 181- |
| | | | | | | 200 |
| IGR | 201-220 | 201-220 | 201-220 | 201-220 | 201-220 | 201- |
| | | | | | | 220 |
| IGR | 221-240 | 221-240 | 221-240 | 221-240 | 221-240 | 221- |
| | | | | | | 240 |
| IGR | 241-260 | 241-260 | 241-260 | 241-260 | 241-260 | 241- |
| | | | | | | 260 |
| IGR | 261-280 | 261-280 | 261-280 | 261-280 | 261-280 | 261- |
| | | | | | | 280 |
| IGR | 281-300 | 281-300 | 281-300 | 281-300 | 281-300 | 281- |
| | | | | | | 300 |

^{a}Intergenic Region, measured in nucleotide.

[0156] Depending on the purpose (e.g., to have strong immunogenicity) of the inserted heterologous nucleotide sequence, the position of the insertion and the length of the intergenic region of the inserted heterologous nucleotide sequence can be determined by various indexes including, but not limited to, replication kinetics and protein or mRNA expression levels, measured by following non-limiting examples of assays: plaque assay, fluorescent-focus assay, infectious center assay, transformation assay, endpoint dilution assay, efficiency of plating, electron microscopy, hemagglutination, measurement of viral enzyme activity, viral neutralization, hemagglutination inhibition, complement fixation, immunostaining, immunoprecipitation and immunoblotting, enzyme-linked immunosorbent assay, nucleic acid detection (e.g., Southern blot analysis, Northern blot analysis, Western blot analysis), growth curve, employment of a reporter gene (e.g., using a reporter gene, such as Green Fluorescence Protein (GFP) or enhanced Green Fluorescence Protein (eGFP), integrated to the viral genome the same fashion as the interested heterologous gene to observe the protein expression), or a combination thereof. Procedures of performing these assays are well known in the art (see, e.g., Flint et al., PRINCIPLES OF VIROLOGY, MOLECULAR BIOLOGY, PATHOGENESIS, AND CONTROL, 2000, ASM Press pp 25-56, the entire text is incorporated herein by reference), and non-limiting examples are given in the Example sections, infra.

[0157] For example, expression levels can be determined by infecting cells in culture with a virus of the invention and subsequently measuring the level of protein expression by, e.g., Western blot analysis or ELISA using antibodies specific to the gene product of the heterologous sequence, or measuring the level of RNA expression by, e.g., Northern blot analysis using probes specific to the heterologous sequence. Similarly, expression levels of the heterologous sequence can be determined by infecting an animal model and measuring the level of protein expressed from the heterologous sequence of the recombinant virus of the invention in the animal model. The protein level can be measured by obtaining a tissue sample from the infected animal and then subjecting the tissue sample to Western blot analysis or ELISA, using antibodies specific to the gene product of the heterologous sequence. Further, if an animal model is used, the titer of antibodies produced by the animal against the gene product of the heterologous sequence can be determined by any technique known to the skilled artisan, including but not limited to, ELISA.

[0158] As the heterologous sequences can be homologous to a nucleotide sequence in the genome of the virus, care should be taken that the probes and the antibodies are indeed specific to the heterologous sequence or its gene product.

[0159] In certain specific embodiments, expression levels of F-protein of RSV or hMPV from chimeric b/h PIV3 RSV or b/h PIV3 hMPV or b/h PIV3 RSV F and hMPV F can be determined by any technique known to the skilled artisan. Expression levels of the F-protein can be determined by infecting cells in a culture with the chimeric virus of the invention and measuring the level of protein expression by, e.g., Western blot analysis or ELISA using antibodies specific to the F-protein and/or the G-protein of hMPV, or measuring the level of RNA expression by, e.g., Northern blot analysis using probes specific to the F-gene and/or the G-gene of human metapneumovirus. Similarly, expression levels of the heterologous sequence can be determined using an animal model by infecting an animal and measuring the level of F-protein and/or G-protein in the animal model. The protein level can be measured by obtaining a tissue sample from the infected animal and then subjecting the tissue sample to Western blot analysis or ELISA using antibodies specific to F-protein and/or G-protein of the heterologous sequence. Further, if an animal model is used, the titer of antibodies produced by the animal against F-protein and/or G-protein can be determined by any technique known to the skilled artisan, including but not limited to, ELISA.

[0160] The rate of replication of a recombinant virus of the invention can be determined by any technique known to the skilled artisan.

[0161] In certain embodiments, to facilitate the identification of the optimal position of the heterologous sequence in the viral genome and the optimal length of the intergenic region, the heterologous sequence encodes a reporter gene. Once the optimal parameters are determined, the reporter gene is replaced by a heterologous nucleotide sequence encoding an antigen of choice. Any reporter gene known to the skilled artisan can be used with the methods of the invention. For more detail, see section 5.5.

[0162] The rate of replication of the recombinant virus can be determined by any standard technique known to the skilled artisan. The rate of replication is represented by the growth rate of the virus and can be determined by plotting the viral titer over the time post infection. The viral titer can be measured by any technique known to the skilled artisan. In certain embodiments, a suspension containing the virus is incubated with cells that are susceptible to infection by the virus. Cell types that can be used with the methods of the invention include, but are not limited to, Vero cells, LLC-MK-2 cells, Hep-2 cells, LF 1043 (HEL) cells, MRC-5 cells, WI-38 cells, 293 T cells, QT 6 cells, QT 35 cells, chicken embryo fibroblast (CEF), or tMK cells. Subsequent to the incubation of the virus with the cells, the number of infected cells is determined. In certain specific embodiments, the virus comprises a reporter gene. Thus, the number of cells expressing the reporter gene is representative of the number of infected cells. In a specific embodiment, the virus comprises a heterologous nucleotide sequence encoding for eGFP, and the number of cells expressing eGFP, i.e., the number of cells infected with the virus, is determined using FACS.

[0163] In certain embodiments, the replication rate of the recombinant virus of the invention is at most 20% of the replication rate of the wild type virus from which the recombinant virus is derived under the same conditions. The same conditions refer to the same initial titer of virus, the same strain of cells, the same incubation temperature, growth medium, number of cells and other test conditions that may affect the replication rate. For example, the replication rate of b/h PIV3 with RSV's F gene in position 1 is at most 20% of the replication rate of bPIV3.

[0164] In certain embodiments, the replication rate of the recombinant virus of the invention is at most 5%, at most 10%, at most 20%, at most 30%, at most 40%, at most 50%, at most 75%, at most 80%, at most 90% of the replication rate of the wild type virus from which the recombinant virus is derived under the same conditions. In certain embodiments, the replication rate of the recombinant virus of the invention is at least 5%, at least 10%, at least 20%, at least 30%, at least 40%, at least 50%, at least 75%, at least 80%, at least 90% of the replication rate of the wild type virus from which the recombinant virus is derived under the same conditions. In certain embodiments, the replication rate of the recombinant virus of the invention is between 5% and 20%, between 10% and 40%, between 25% and 50%, between 40% and 75%, between 50% and 80%, or between 75% and 90% of the replication rate of the wild type virus from which the recombinant virus is derived under the same conditions.

[0165] In certain embodiments, the expression level of the heterologous sequence in the recombinant virus of the invention is at most 20% of the expression level of the F-protein of the wild type virus from which the recombinant virus is derived under the same conditions. The same conditions refer to the same initial titer of virus, the same strain of cells, the same incubation temperature, growth medium, number of cells and other test conditions that may affect the replication rate. For example, the expression level of the heterologous sequence of the F-protein of MPV in position 1 of bPIV3 is at most 20% of the expression level of the bovine F-protein of bPIV3.

[0166] In certain embodiments, the expression level of the heterologous sequence in the recombinant virus of the invention is at most 5%, at most 10%, at most 20%, at most 30%, at most 40%, at most 50%, at most 75%, at most 80%, at most 90% of the expression level of the F-protein of the wild type virus from which the recombinant virus is derived under the same conditions. In certain embodiments, the expression level of the heterologous sequence in the recombinant virus of the invention is at least 5%, at least 10%, at least 20%, at least 30%, at least 40%, at least 50%, at least 75%, at least 80%, at least 90% of the expression level of the F-protein of the wild type virus from which the recombinant virus is derived under the same conditions. In certain embodiments, the expression level of the heterologous sequence in the recombinant virus of the invention is between 5% and 20%, between 10% and 40%, between 25% and 50%, between 40% and 75%, between 50% and 80%, or between 75% and 90% of the expression level of the F-protein of the wild type virus from which the recombinant virus is derived under the same conditions.

[0167] 5.1.4. Insertion of the Heterologous Gene Sequence into the HN Gene

[0168] The protein responsible for the hemagglutinin and neuraminidase activities of PIV are coded for by a single gene, HN. The HN protein is a major surface glycoprotein of the virus. For a variety of viruses, such as parainfluenza, the hemagglutinin and neuraminidase proteins have been shown to contain a number of antigenic sites. Consequently, this protein is a potential target for the humoral immune response after infection. Therefore, substitution of antigenic sites of HN with a portion of a foreign protein may provide for a vigorous humoral response against this foreign peptide. If a sequence is inserted within the HN molecule, and it is expressed on the outside surface of the HN, it will be immunogenic. For example, a peptide derived from gp160 of HIV could replace an antigenic site of the HN protein, resulting in a humoral immune response to both gp160 and the HN protein. In a different approach, the foreign peptide sequence may be inserted within the antigenic site without deleting any viral sequences. Expression products of such constructs may be useful in vaccines against the foreign antigen, and may indeed circumvent a problem discussed earlier, that of propagation of the recombinant virus in the vaccinated host. An intact HN molecule with a substitution only in antigenic sites may allow for HN function and thus allow for the construction of a viable virus. Therefore, this virus can be grown without the need for additional helper functions. The virus may also be attenuated in other ways to avoid any danger of accidental escape.

[0169] Other hybrid constructions may be made to express proteins on the cell surface or enable them to be released from the cell. As a surface glycoprotein, HN has an amino-terminal cleavable signal sequence necessary for transport to the cell surface, and a carboxy-terminal sequence necessary for membrane anchoring. In order to express an intact foreign protein on the cell surface, it may be necessary to use these HN signals to create a hybrid protein. In this case, the fusion protein may be expressed as a separate fusion protein from an additional internal promoter. Alternatively, if only the transport signals are present and the membrane anchoring domain is absent, the protein may be secreted out of the cell.

[0170] 5.1.5. Construction of Bicistronic RNA

[0171] Bicistronic mRNA could be constructed to permit internal initiation of translation of viral sequences and allow for the expression of foreign protein coding sequences from the regular terminal initiation site. Alternatively, a bicistronic mRNA sequence may be constructed wherein the viral sequence is translated from the regular terminal open reading frame, while the foreign sequence is initiated from an internal site. Certain internal ribosome entry site (IRES) sequences may be utilized. The IRES sequences that are chosen should be short enough to avoid interference with parainfluenza packaging limitations. Thus, it is preferable that the IRES chosen for such a bicistronic approach be no more than 500 nucleotides in length, with less than 250 nucleotides being of ideal length. In a specific embodiment, the IRES is derived from a picornavirus and does not include any additional picornaviral sequences. Preferred IRES elements include, but are not limited to, the mammalian BiP IRES and the hepatitis C virus IRES.

[0172] Alternatively, a foreign protein may be expressed from a new internal transcriptional unit in which the transcriptional unit has an initiation site and polyadenylation site. In another embodiment, the foreign gene is inserted into a PIV gene such that the resulting expressed protein is a fusion protein.

[0173] 5.2. Expression of Heterologous Gene Products Using Recombinant cDNA And RNA Templates

[0174] The recombinant templates prepared as described above can be used in a variety of ways to express the heterologous gene products in appropriate host cells or to create chimeric viruses that express the heterologous gene products. In one embodiment, the recombinant cDNA can be used to transfect appropriate host cells and the resulting RNA may direct the expression of the heterologous gene product at high levels. Host cell systems which provide for high levels of expression include continuous cell lines that supply viral functions such as cell lines superinfected with PIV, cell lines engineered to complement PIV functions, etc.

[0175] In an alternate embodiment of the invention, the recombinant templates may be used to transfect cell lines that express a viral polymerase protein in order to achieve expression of the heterologous gene product. To this end, transformed cell lines that express a polymerase protein such as the L protein may be utilized as appropriate host cells. Host cells may be similarly engineered to provide other viral functions or additional functions such as HN, NP or N.

[0176] In another embodiment, a helper virus may provide the RNA polymerase protein utilized by the cells in order to achieve expression of the heterologous gene product. In yet another embodiment, cells may be transfected with vectors encoding viral proteins such as the N or NP, P, M2-1 and L proteins.

[0177] Different technique may be used to detect the expression of heterologous gene products (see, e.g., Flint et al., PRINCIPLES OF VIROLOGY, MOLECULAR BIOLOGY, PATHOGENESIS, AND CONTROL, 2000, ASM Press pp 25-56, the entire text is incorporated herein by reference). In an examplary assay, cells infected with the virus are permeabilized with methanol or acetone and incubated with an antibody raised against the heterologous gene products. A second antibody that recognizes the first antibody is then added. This second antibody is usually conjugated to an indicator so that the expression of heterologous gene products may be visualized or detected.

[0178] 5.3. Rescue of Recombinant Virus Particles

[0179] In order to prepare chimeric virus, modified cDNAs, virus RNAs, or RNA coding for the PIV genome and/or foreign proteins in the plus or minus sense may be used to transfect cells that provide viral proteins and functions required for replication and rescue. Alternatively, cells may be transfected with helper virus before, during, or after transfection by the DNA or RNA molecule coding for the PIV genome and/or foreign proteins. The synthetic recombinant plasmid PIV DNAs and RNAs can be replicated and rescued into infectious virus particles by any number of techniques known in the art, as described in U.S. Pat. No. 5,166,057 issued Nov. 24, 1992; in U.S. Pat. No. 5,854,037 issued Dec. 29, 1998; in European Patent Publication EP 0702085A1, published Feb. 20, 1996; in U.S. patent application Ser. No. 09/152,845; in International Patent Publications PCT WO97/12032 published Apr. 3, 1997; WO96/34625 published Nov. 7, 1996; in European Patent Publication EP-A780475; WO 99/02657 published Jan. 21, 1999; WO 98/53078 published Nov. 26, 1998; WO 98/02530 published Jan. 22, 1998; WO 99/15672 published Apr. 1, 1999; WO 98/13501 published Apr. 2, 1998; WO 97/06270 published Feb. 20, 1997; and EPO 780 47SA1 published Jun. 25, 1997, each of which is incorporated by reference herein in its entirety.

[0180] In one embodiment of the present invention, synthetic recombinant viral RNAs that contain the non-coding regions of the negative strand virus RNA essential for the recognition by viral polymerases and for packaging signals necessary to generate a mature virion, may be prepared. There are a number of different approaches that may be used to apply the reverse genetics approach to rescue negative strand RNA viruses. First, the recombinant RNAs are synthesized from a recombinant DNA template and reconstituted in vitro with purified viral polymerase complex to form recombinant ribonucleoproteins (RNPs) that can be used to transfect cells. In another approach, a more efficient transfection is achieved if the viral polymerase proteins are present during transcription of the synthetic RNAs either in vitro or in vivo. With this approach the synthetic RNAs may be transcribed from cDNA plasmids that are either co-transcribed in vitro with cDNA plasmids encoding the polymerase proteins, or transcribed in vivo in the presence of polymerase proteins, i.e., in cells which transiently or constitutively express the polymerase proteins.

[0181] In additional approaches described herein, the production of infectious chimeric virus may be replicated in host cell systems that express a PIV viral polymerase protein (e.g., in virus/host cell expression systems; transformed cell lines engineered to express a polymerase protein, etc.), so that infectious chimeric viruses are rescued. In this instance, helper virus need not be utilized since this function is provided by the viral polymerase proteins expressed. In accordance with the present invention, any technique known to those of skill in the art may be used to achieve replication and rescue of recombinant and chimeric viruses. One approach involves supplying viral proteins and functions required for replication in vitro prior to transfecting host cells. In such an embodiment, viral proteins may be supplied in the form of wild type virus, helper virus, purified viral proteins or recombinantly expressed viral proteins. The viral proteins may be supplied prior to, during or post transcription of the synthetic cDNAs or RNAs encoding the chimeric virus. The entire mixture may be used to transfect host cells. In another approach, viral proteins and functions required for replication may be supplied prior to or during transcription of the synthetic cDNAs or RNAs encoding the chimeric virus. In such an embodiment, viral proteins and functions required for replication are supplied in the form of wild type virus, helper virus, viral extracts, synthetic cDNAs or RNAs that express the viral proteins are introduced into the host cell via infection or transfection. This infection/transfection takes place prior to or simultaneous to the introduction of the synthetic cDNAs or RNAs encoding the chimeric virus.

[0182] In a particularly desirable approach, cells engineered to express all viral genes of the recombinant or chimeric virus of the invention may result in the production of infectious chimeric virus that contain the desired genotype; thus eliminating the need for a selection system. Theoretically, one can replace any one of the six genes or part of any one of the six genes encoding structural proteins of PIV with a foreign sequence. However, a necessary part of this equation is the ability to propagate the defective virus (defective because a normal viral gene product is missing or altered). A number of possible approaches are available to circumvent this problem. In one approach, a virus having a mutant protein can be grown in cell lines that are constructed to constitutively express the wild type version of the same protein. By this way, the cell line complements the mutation in the virus. Similar techniques may be used to construct transformed cell lines that constitutively express any of the PIV genes. These cell lines which are made to express the viral protein may be used to complement the defect in the recombinant virus and thereby propagate it. Alternatively, certain natural host range systems may be available to propagate recombinant virus.

[0183] In yet another embodiment, viral proteins and functions required for replication may be supplied as genetic material in the form of synthetic cDNAs or RNAs so that they are co-transcribed with the synthetic cDNAs or RNAs encoding the chimeric virus. In a particularly desirable approach, plasmids that express the chimeric virus and the viral polymerase and/or other viral functions are co-transfected into host cells. For example, plasmids encoding the genomic or antigenomic PIV RNA, either wild type or modified, may be co-transfected into host cells with plasmids encoding the PIV viral polymerase proteins NP or N, P, M2-1 or L. Alternatively, rescue of chimeric b/h PIV3 virus may be accomplished by the use of Modified Vaccinia Virus Ankara (MVA) encoding T7 RNA polymerase, or a combination of MVA and plasmids encoding the polymerase proteins (N, P, and L). For example, MVA-T7 or Fowl Pox-T7 can be infected into Vero cells, LLC-MK-2 cells, Hep-2 cells, LF 1043 (HEL) cells, tMK cells, LLC-MK2, HUT 292, FRHL-2 (rhesus), FCL-1 (green monkey), WI-38 (human), MRC-5 (human) cells, 293 T cells, QT 6 cells, QT 35 cells and CEF cells. After infection with MVA-T7 or Fow Pox-T7, a full length antigenomic b/h PIV3 cDNA may be transfected into the HeLa or Vero cells together with the NP, P, M2-1 and L encoding expression plasmids. Alternatively, the polymerase may be provided by plasmid transfection. The cells and cell supernatant can subsequently be harvested and subjected to a single freeze-thaw cycle. The resulting cell lysate may then be used to infect a fresh HeLa or Vero cell monolayer in the presence of 1-beta-D-arabinofuranosylcytosine (ara C), a replication inhibitor of vaccinia virus, to generate a virus stock. The supernatant and cells from these plates can then be harvested, freeze-thawed once, and the presence of bPIV3 virus particles detected by immunostaining of virus plaques using PIV3-specific antiserum.

[0184] Another approach to propagating the recombinant virus involves co-cultivation with wild-type virus. This could be done by simply taking recombinant virus and co-infecting cells with this and another wild-type virus (preferably a vaccine strain). The wild-type virus should complement for the defective virus gene product and allow growth of both the wild-type and recombinant virus. Alternatively, a helper virus may be used to support propagation of the recombinant virus.

[0185] In another approach, synthetic templates may be replicated in cells co-infected with recombinant viruses that express the PIV virus polymerase protein. In fact, this method may be used to rescue recombinant infectious virus in accordance with the invention. To this end, the PIV polymerase protein may be expressed in any expression vector/host cell system, including but not limited to viral expression vectors (e.g., vaccinia virus, adenovirus, baculovirus, etc.) or cell lines that express a polymerase protein (e.g., see Krystal et al., 1986, Proc. Natl. Acad. Sci. USA 83: 2709-2713). Moreover, infection of host cells expressing all six PIV proteins may result in the production of infectious chimeric virus particles. It should be noted that it may be possible to construct a recombinant virus without altering virus viability. These altered viruses would then be growth competent and would not need helper functions to replicate.

[0186] 5.4. Attenuation of Recombinant Viruses

[0187] The recombinant viruses of the invention can be further genetically engineered to exhibit an attenuated phenotype. In particular, the recombinant viruses of the invention exhibit an attenuated phenotype in a subject to which the virus is administered as a vaccine. Attenuation can be achieved by any method known to a skilled artisan. Without being bound by theory, the attenuated phenotype of the recombinant virus can be caused, e.g., by using a virus that naturally does not replicate well in an intended host (e.g., using a bovine PIV3 vector in human), by reduced replication of the viral genome, by reduced ability of the virus to infect a host cell, or by reduced ability of the viral proteins to assemble to an infectious viral particle relative to the wild type strain of the virus. The viability of certain sequences of the virus, such as the leader and the trailer sequence can be tested using a minigenome assay (see section 5.5.1).

[0188] The attenuated phenotypes of a recombinant virus of the invention can be tested by any method known to the artisan (see, e.g., section 5.5). A candidate virus can, for example, be tested for its ability to infect a host or for the rate of replication in a cell culture system. In certain embodiments, a mini-genome system is used to test the attenuated virus when the gene that is altered is N, P, L, M2 or a combination thereof. In certain embodiments, growth curves at different temperatures are used to test the attenuated phenotype of the virus. For example, an attenuated virus is able to grow at 35° C., but not at 39° C. or 40° C. In certain embodiments, different cell lines can be used to evaluate the attenuated phenotype of the virus. For example, an attenuated virus may only be able to grow in monkey cell lines but not the human cell lines, or the achievable virus titers in different cell lines are different for the attenuated virus. In certain embodiments, viral replication in the respiratory tract of a small animal model, including but not limited to, hamsters, cotton rats, mice and guinea pigs, is used to evaluate the attenuated phenotypes of the virus. In other embodiments, the immune response induced by the virus, including but not limited to, the antibody titers (e.g., assayed by plaque reduction neutralization assay or ELISA) is used to evaluate the attenuated phenotypes of the virus. In a specific embodiment, the plaque reduction neutralization assay or ELISA is carried out at a low dose. In certain embodiments, the ability of the recombinant virus to elicit pathological symptoms in an animal model can be tested. A reduced ability of the virus to elicit pathological symptoms in an animal model system is indicative of its attenuated phenotype. In a specific embodiment, the candidate viruses are tested in a monkey model for nasal infection, indicated by mucous production.

[0189] The viruses of the invention can be attenuated such that one or more of the functional characteristics of the virus are impaired. In certain embodiments, attenuation is measured in comparison to the wild type strain of the virus from which the attenuated virus is derived. In other embodiments, attenuation is determined by comparing the growth of an attenuated virus in different host systems. Thus, for a non-limiting example, a bovine PIV3 is said to be attenuated when grown in a human host if the growth of the bovine PIV3 in the human host is reduced compared to the growth of the bovine PIV3 in a bovine host.

[0190] In certain embodiments, the attenuated virus of the invention is capable of infecting a host, is capable of replicating in a host such that infectious viral particles are produced. In comparison to the wild type strain, however, the attenuated strain grows to lower titers or grows more slowly. Any technique known to the skilled artisan can be used to determine the growth curve of the attenuated virus and compare it to the growth curve of the wild type virus. For exemplary methods see Example section, infra. In a specific embodiment, the attenuated virus grows to a titer of less than 10⁵ pfu/ml, of less than 10⁴ pfu/ml, of less than 10³ pfu/ml, or of less than 10² pfu/ml in Vero cells under conditions as described.

[0191] In certain embodiments, the attenuated virus of the invention (e.g., a chimeric PIV3) cannot replicate in human cells as well as the wild type virus (e.g., wild type PIV3) does. However, the attenuated virus can replicate well in a cell line that lack interferon functions, such as Vero cells.

[0192] In other embodiments, the attenuated virus of the invention is capable of infecting a host, of replicating in the host, and of causing proteins of the virus of the invention to be inserted into the cytoplasmic membrane, but the attenuated virus does not cause the host to produce new infectious viral particles. In certain embodiments, the attenuated virus infects the host, replicates in the host, and causes viral proteins to be inserted in the cytoplasmic membrane of the host with the same efficiency as the wild type mammalian virus. In other embodiments, the ability of the attenuated virus to cause viral proteins to be inserted into the cytoplasmic membrane into the host cell is reduced compared to the wild type virus. In certain embodiments, the ability of the attenuated mammalian virus to replicate in the host is reduced compared to the wild type virus. Any technique known to the skilled artisan can be used to determine whether a virus is capable of infecting a mammalian cell, of replicating within the host, and of causing viral proteins to be inserted into the cytoplasmic membrane of the host. For illustrative methods see section 5.5.

[0193] In certain embodiments, the attenuated virus of the invention is capable of infecting a host. In contrast to a wild type PIV, however, the attenuated PIV cannot be replicated in the host. In a specific embodiment, the attenuated virus can infect a host and can cause the host to insert viral proteins in its cytoplasmic membranes, but the attenuated virus is incapable of being replicated in the host. Any method known to the skilled artisan can be used to test whether the attenuated virus has infected the host and has caused the host to insert viral proteins in its cytoplasmic membranes.

[0194] In certain embodiments, the ability of the attenuated mammalian virus to infect a host is reduced compared to the ability of the wild type virus to infect the same host. Any technique known to the skilled artisan can be used to determine whether a virus is capable of infecting a host. For illustrative methods see section 5.5.

[0195] In certain embodiments, mutations (e.g., missense mutations) are introduced into the genome of the virus to generated a virus with an attenuated phenotype. Mutations (e.g., missense mutations) can be introduced into the N-gene, the P-gene, the F-gene, the M2-gene, the M2-1-gene, the M2-2-gene, the SH-gene, the G-gene or the L-gene of the recombinant virus. Mutations can be additions, substitutions, deletions, or combinations thereof. In specific embodiments, a single amino acid deletion mutation for the N, P, L or M2 proteins are introduced, which can be screened for functionality in the mini-genome assay system and be evaluated for predicted functionality in the virus. In more specific embodiments, the missense mutation is a cold-sensitive mutation. In other embodiments, the missense mutation is a heat-sensitive mutation. In one embodiment, major phosphorylation sites of P protein of the virus is removed. In another embodiment, a mutation or mutations are introduced into the L gene of the virus to generate a temperature sensitive strain. In yet another embodiment, the cleavage site of the F gene is mutated in such a way that cleavage does not occur or occurs at very low efficiency.

[0196] In other embodiments, deletions are introduced into the genome of the recombinant virus. In more specific embodiments, a deletion can be introduced into the N-gene, the P-gene, the F-gene, the M2-gene, the M2-1-gene, the M2-2-gene, the SH-gene, the G-gene or the L-gene of the recombinant virus. In specific embodiments, the deletion is in the M2-gene of the recombinant virus of the present invention. In other specific embodiments, the deletion is in the SH-gene of the recombinant virus of the present invention. In yet another specific embodiment, both the M2-gene and the SH-gene are deleted.

[0197] In certain embodiments, the intergenic region of the recombinant virus is altered. In one embodiment, the length of the intergenic region is altered. See Section 5.1.2. for illustrative examples. In another embodiment, the intergenic regions are shuffled from 5′ to 3′ end of the viral genome.

[0198] In other embodiments, the genome position of a gene or genes of the recombinant virus is changed. In one embodiment, the F or G gene is moved to the 3′ end of the genome. In another embodiment, the N gene is moved to the 5′ end of the genome.

[0199] In certain embodiments, attenuation of the virus is achieved by replacing a gene of the wild type virus with a gene of a virus of a different species. In illustrative embodiments, the N-gene, the P-gene, the F-gene, the M2-gene, the M2-1-gene, the M2-2-gene, the SH-gene, the HN-gene or the L-gene of bPIV3 is replaced with the N-gene, the P-gene, the F-gene, the M2-gene, the M2-1-gene, the M2-2-gene, the SH-gene, the HN-gene or the L-gene, respectively, of hPIV3. In other illustrative embodiments, the N-gene, the P-gene, the F-gene, the M2-gene, the M2-1-gene, the M2-2-gene, the SH-gene, the HN-gene or the L-gene of hPIV3 is replaced with the N-gene, the P-gene, the F-gene, the M2-gene, the M2-1-gene, the M2-2-gene, the SH-gene, the HN-gene or the L-gene, respectively, of bPIV3. In a preferred embodiment, attenuation of the virus is achieved by replacing one or more polymerase associated genes (e.g., N, P, L or M2) with genes of a virus of a different species.

[0200] In certain embodiments, attenuation of the virus is achieved by replacing or deleting one or more specific domains of a protein of the wild type virus with domains derived from the corresponding protein of a virus of a different species. In an illustrative embodiment, the ectodomain of a F protein of bPIV3 is replaced with an ectodomain of a F protein of a metapneumovirus. In a preferred embodiment, one or more specific domains of L, N, or P protein are replaced with domains derived from corresponding proteins of a virus of a different species. In another illustrative embodiment, the transmembrane domain of the F protein is deleted so that a soluble F protein is expressed.

[0201] In certain embodiments of the invention, the leader and/or trailer sequence of the recombinant virus of the invention can be modified to achieve an attenuated phenotype. In certain, more specific embodiments, the leader and/or trailer sequence is reduced in length relative to the wild type virus by at least 1 nucleotide, at least 2 nucleotides, at least 3 nucleotides, at least 4 nucleotides, at least 5 nucleotides or at least 6 nucleotides. In certain other, more specific embodiments, the sequence of the leader and/or trailer of the recombinant virus is mutated. In a specific embodiment, the leader and the trailer sequence are 100% complementary to each other. In other embodiments, 1 nucleotide, 2 nucleotides, 3 nucleotides, 4 nucleotides, 5 nucleotides, 6 nucleotides, 7 nucleotides, 8 nucleotides, 9 nucleotides, or 10 nucleotides are not complementary to each other where the remaining nucleotides of the leader and the trailer sequences are complementary to each other. In certain embodiments, the non-complementary nucleotides are identical to each other. In certain other embodiments, the non-complementary nucleotides are different from each other. In other embodiments, if the non-complementary nucleotide in the trailer is purine, the corresponding nucleotide in the leader sequence is also a purine. In other embodiments, if the non-complementary nucleotide in the trailer is pyrimidine, the corresponding nucleotide in the leader sequence is also a purine.

[0202] When a live attenuated vaccine is used, its safety must also be considered. The vaccine must not cause disease. Any techniques known in the art that can make a vaccine safe may be used in the present invention. In addition to attenuation techniques, other techniques may be used. One non-limiting example is to use a soluble heterologous gene that cannot be incorporated into the virion membrane. For example, a single copy of the soluble RSV F gene, a version of the RSV gene lacking the transmembrane and cytosolic domains, can be used. Since it cannot be incorporated into the virion membrane, the virus tropism is not expected to change.

[0203] Various assays can be used to test the safety of a vaccine. See section 5.5., infra. Particularly, sucrose gradients and neutralization assays can be used. A sucrose gradient assay can be used to determine whether a heterologous protein is inserted in a virion. If the heterologous protein is inserted in the virion, the virion should be tested for its ability to cause symptoms even if the parental strain does not cause symptoms. Without bound by theory, if the heterologous protein is incorporated in the virion, the virus may have acquired new, possibly pathological, properties.

[0204] 5.5. Measurement of Viral Titer, Expression of Antigenic Sequences, Immunogenicity and Other Characteristics of Chimeric Viruses

[0205] A number of assays may be employed in accordance with the present invention in order to determine the rate of growth of a chimeric or recombinant virus in a cell culture system, an animal model system or in a subject. A number of assays may also be employed in accordance with the present invention in order to determine the requirements of the chimeric and recombinant viruses to achieve infection, replication and packaging of virions.

[0206] The assays described herein may be used to assay viral titre over time to determine the growth characteristics of the virus. In a specific embodiment, the viral titre is determined by obtaining a sample from the infected cells or the infected subject, preparing a serial dilution of the sample and infecting a monolayer of cells that are susceptible to infection with the virus at a dilution of the virus that allows for the emergence of single plaques. The plaques can then be counted and the viral titre express as plaque forming units per milliliter of sample. In a specific embodiment of the invention, the growth rate of a virus of the invention in a subject is estimated by the titer of antibodies against the virus in the subject. Without being bound by theory, the antibody titer in the subject reflects not only the viral titer in the subject but also the antigenicity. If the antigenicity of the virus is constant, the increase of the antibody titer in the subject can be used to determine the growth curve of the virus in the subject. In a preferred embodiment, the growth rate of the virus in animals or humans is best tested by sampling biological fluids of a host at multiple time points post-infection and measuring viral titer.

[0207] The expression of heterologous gene sequence in a cell culture system or in a subject can be determined by any technique known to the skilled artisan. In certain embodiments, the expression of the heterologous gene is measured by quantifying the level of the transcript. The level of the transcript can be measured by Northern blot analysis or by RT-PCR using probes or primers, respectively, that are specific for the transcript. The transcript can be distinguished from the genome of the virus because the virus is in the antisense orientation whereas the transcript is in the sense orientation. In certain embodiments, the expression of the heterologous gene is measured by quantifying the level of the protein product of the heterologous gene. The level of the protein can be measured by Western blot analysis using antibodies that are specific to the protein.

[0208] In a specific embodiment, the heterologous gene is tagged with a peptide tag. The peptide tag can be detected using antibodies against the peptide tag. The level of peptide tag detected is representative for the level of protein expressed from the heterologous gene. Alternatively, the protein expressed from the heterologous gene can be isolated by virtue of the peptide tag. The amount of the purified protein correlates with the expression level of the heterologous gene. Such peptide tags and methods for the isolation of proteins fused to such a peptide tag are well known in the art. A variety of peptide tags known in the art may be used in the modification of the heterologous gene, such as, but not limited to, the immunoglobulin constant regions, polyhistidine sequence (Petty, 1996, Metal-chelate affinity chromatography, in Current Protocols in Molecular Biology, volume 1-3 (1994-1998). Ed. by Ausubel, F. M., Brent, R., Kunston, R. E., Moore, D. D., Seidman, J. G., Smith, J. A. and Struhl, K. Published by John Wiley and sons, Inc., USA, Greene Publish. Assoc. & Wiley Interscience), glutathione S-transferase (GST; Smith, 1993, Methods Mol. Cell Bio. 4:220-229), the E. coli maltose binding protein (Guan et al., 1987, Gene 67:21-30), various cellulose binding domains (U.S. Pat. Nos. 5,496,934; 5,202,247; 5,137,819; Tomme et al., 1994, Protein Eng. 7:117-123), and the FLAG epitope (Short Protocols in Molecular Biology, 1999, Ed. Ausubel et al., John Wiley & Sons, Inc., Unit 10.11) etc. Other peptide tags are recognized by specific binding partners and thus facilitate isolation by affinity binding to the binding partner, which is preferably immobilized and/or on a solid support. As will be appreciated by those skilled in the art, many methods can be used to obtain the coding region of the above-mentioned peptide tags, including but not limited to, DNA cloning, DNA amplification, and synthetic methods. Some of the peptide tags and reagents for their detection and isolation are available commercially.

[0209] Samples from a subject can be obtained by any method known to the skilled artisan. In certain embodiments, the sample consists of nasal aspirate, throat swab, sputum or broncho-alveolar lavage.

[0210] 5.5.1. Minigenome Constructs

[0211] Minireplicon constructs can be generated to contain an antisense reporter gene. Any reporter gene known to the skilled artisan can be used with the invention. In a specific embodiment, the reporter gene is CAT. In certain embodiments, the reporter gene can be flanked by the negative-sense bPIV or hPIV leader linked to the hepatitis delta ribozyme (Hep-d Ribo) and T7 polymerase termination (T-T7) signals, and the bPIV or hPIV trailer sequence preceded by the T7 RNA polymerase promoter.

[0212] In certain embodiments, the plasmid encoding the minireplicon is transfected into a host cell. The host cell expresses T7 RNA polymerase, the N gene, the P gene, the L gene, and the M2.1 gene. In certain embodiments, the host cell is transfected with plasmids encoding T7 RNA polymerase, the N gene, the P gene, the L gene, and the M2.1 gene. In other embodiments, the plasmid encoding the minireplicon is transfected into a host cell and the host cell is infected with a helper virus.

[0213] The expression level of the reporter gene and/or its activity can be assayed by any method known to the skilled artisan, such as, but not limited to, the methods described in section 5.5.6.

[0214] In certain, more specific, embodiments, the minireplicon comprises the following elements, in the order listed: T7 RNA Polymerase or RNA polymerase I, leader sequence, gene start, GFP, trailer sequence, Hepatitis delta ribozyme sequence or RNA polymerase I termination sequence. If T7 is used as RNA polymerase, Hepatitis delta ribozyme sequence should be used as termination sequence. If RNA polymerase I is used, RNA polymerase I termination sequence may be used as a termination signal. Dependent on the rescue system, the sequence of the minireplicon can be in the sense or antisense orientation. In certain embodiments, the leader sequence can be modified relative to the wild type leader sequence of the virus of the invention. The leader sequence can optionally be preceded by an AC. The T7 promoter sequence can be with or without a G-doublet or triplet, where the G-doublet or triplet provides for increased transcription.

[0215] In a specific embodiment, a cell is infected with a virus of the invention at T0. 24 hours later, at T24, the cell is transfected with a minireplicon construct. 48 hours after T0 and 72 hours after T0, the cells are tested for the expression of the reporter gene. If a fluorescent reporter gene product is used (e.g., GFP), the expression of the reporter gene can be tested using FACS.

[0216] In another embodiment, a cell is transfected with six plasmids at T=0 hours. Cells are then harvested at T=40 hours and T=60 hours and analyzed for CAT or GFP expression.

[0217] In another specific embodiment, a cell is infected with MVA-T7 at T0. 1 hour later, at T1, the cell is transfected with a minireplicon construct. 24 hours after T0, the cell is infected with a virus of the invention. 72 hours after T0, the cells are tested for the expression of the reporter gene. If a fluorescent reporter gene product is used (e.g., GFP), the expression of the reporter gene can be tested using FACS.

[0218] 5.5.2. Measurement of Incidence of Infection Rate

[0219] The incidence of infection can be determined by any method well-known in the art, including but not limited to, the testing of clinical samples (e.g., nasal swabs) for the presence of an infection, e.g., hMPV, RSV, hPIV, or bPIV/hPIV components can be detected by immunofluorescence assay (IFA) using an anti-hMPV-antigen antibody, an anti-RSV-antigen antibody, an anti-hPIV-antigen antibody, and/or an antibody that is specific to the gene product of the heterologous nucleotide sequence, respectively.

[0220] In certain embodiments, samples containing intact cells can be directly processed, whereas isolates without intact cells should first be cultured on a permissive cell line (e.g. HEp-2 cells). In an illustrative embodiment, cultured cell suspensions are cleared by centrifugation at, e.g., 300×g for 5 minutes at room temperature, followed by a PBS, pH 7.4 (Ca++ and Mg++ free) wash under the same conditions. Cell pellets are resuspended in a small volume of PBS for analysis. Primary clinical isolates containing intact cells are mixed with PBS and centrifuged at 300×g for 5 minutes at room temperature. Mucus is removed from the interface with a sterile pipette tip and cell pellets are washed once more with PBS under the same conditions. Pellets are then resuspended in a small volume of PBS for analysis. Five to ten microliters of each cell suspension are spotted per 5 mm well on acetone washed 12-well HTC supercured glass slides and allowed to air dry. Slides are fixed in cold (−20° C.) acetone for 10 minutes. Reactions are blocked by adding PBS-1% BSA to each well followed by a 10 minute incubation at room temperature. Slides are washed three times in PBS-0.1% Tween-20 and air dried. Ten microliters of each primary antibody reagent diluted to 250 ng/ml in blocking buffer is spotted per well and reactions are incubated in a humidified 37° C. environment for 30 minutes. Slides are then washed extensively in three changes of PBS-0.1% Tween-20 and air dried. Ten microliters of appropriate secondary conjugated antibody reagent diluted to 250 ng/ml in blocking buffer are spotted per respective well and reactions are incubated in a humidified 37° C. environment for an additional 30 minutes. Slides are then washed in three changes of PBS-0.1% Tween-20. Five microliters of PBS-50% glycerol-10 mM Tris pH 8.0-1 mM EDTA are spotted per reaction well and slides are mounted with cover slips. Each reaction well is subsequently analyzed by fluorescence microscopy at 200×power using a B-2A filter (EX 450-490 nm). Positive reactions are scored against an autofluorescent background obtained from unstained cells or cells stained with secondary reagent alone. RSV positive reactions are characterized by bright fluorescence punctuated with small inclusions in the cytoplasm of infected cells.

[0221] 5.5.3. Measurement of Serum Titer

[0222] Antibody serum titer can be determined by any method well-known in the art, for example, but not limited to, the amount of antibody or antibody fragment in serum samples can be quantitated by a sandwich ELISA. Briefly, the ELISA consists of coating microtiter plates overnight at 4° C. with an antibody that recognizes the antibody or antibody fragment in the serum. The plates are then blocked for approximately 30 minutes at room temperature with PBS-Tween-0.5% BSA. Standard curves are constructed using purified antibody or antibody fragment diluted in PBS-BSA-BSA, and samples are diluted in PBS-BSA. The samples and standards are added to duplicate wells of the assay plate and are incubated for approximately 1 hour at room temperature. Next, the non-bound antibody is washed away with PBS-TWEEN and the bound antibody is treated with a labeled secondary antibody (e.g., horseradish peroxidase conjugated goat-anti-human IgG) for approximately 1 hour at room temperature. Binding of the labeled antibody is detected by adding a chromogenic substrate specific for the label and measuring the rate of substrate turnover, e.g., by a spectrophotometer. The concentration of antibody or antibody fragment levels in the serum is determined by comparison of the rate of substrate turnover for the samples to the rate of substrate turnover for the standard curve.

[0223] 5.5.4. Challenge Studies

[0224] This assay is used to determine the ability of the recombinant viruses of the invention and of the vaccines of the invention to prevent lower respiratory tract viral infection in an animal model system, including but not limited to, cotton rats, Syrian Golden hamsters, and Balb/c mice. The recombinant virus and/or the vaccine can be administered by intravenous (IV) route, by intramuscular (IM) route or by intranasal route (IN). The recombinant virus and/or the vaccine can be administered by any technique well-known to the skilled artisan. This assay is also used to correlate the serum concentration of antibodies with a reduction in lung titer of the virus to which the antibodies bind. On day 0, groups of animals, including but not limited to, cotton rats (Sigmodon hispidis, average weight 100 g) and hamsters (e.g., Syrian Golden hamsters) are inoculated with the recombinant virus or the vaccine of interest or BSA by intramuscular injection, by intravenous injection, or by intranasal route. Prior to, concurrently with, or subsequent to administration of the recombinant virus or the vaccine of the invention, the animals are infected with wild type virus wherein the wild type virus is the virus against which the vaccine was generated. In certain embodiments, the animals are infected with the wild type virus at least 1 day, at least 2 days, at least 3 days, at least 4 days, at least 5 days, at least 6 days, at least 1 week, at least 2 weeks, at least 3 weeks or at least 4 weeks subsequent to the administration of the recombinant virus and/or the vaccine of the invention. In a preferred embodiment, the animals are infected with the wild type virus 21 days subsequent to the administration of the recombinant virus and/or the vaccine of the invention. In another preferred embodiment, the animals are infected with the wild type virus 28 days subsequent to the administration of the recombinant virus and/or the vaccine of the invention.

[0225] After the infection, the animals are sacrificed, and their nasal turbinate tissue and/or lung tissue are harvested and virus titers are determined by appropriate assays, e.g., plaque assay and TCID₅₀ assay. Bovine serum albumin (BSA) 10 mg/kg can be used as a negative control. Antibody concentrations in the serum at the time of challenge can be determined using a sandwich ELISA.

[0226] 5.5.5. Clinical Trials

[0227] Vaccines of the invention or fragments thereof that have been tested in in vitro assays and animal models may be further evaluated for safety, tolerance, immunogenicity, infectivity and pharmacokinetics in groups of normal healthy human volunteers, including all age groups. In a preferred embodiment, the healthy human volunteers are infants at about 6 weeks of age or older, children and adults. The volunteers are administered intranasally, intramuscularly, intravenously or by a pulmonary delivery system in a single dose of a recombinant virus of the invention and/or a vaccine of the invention. Multiple doses of virus and/or vaccine of the invention may be required in seronegative children 6 to 60 months of age. Multiple doses of virus and/or vaccine of the invention may also be required in the first six months of life to stimulate local and systemic immunity and to overcome neutralization by maternal antibody. In a preferred embodiment, a primary dosing regimen at 2, 4, and 6 months of age and a booster dose at the beginning of the second year of life are used. A recombinant virus of the invention and/or a vaccine of the invention can be administered alone or concurrently with pediatric vaccines recommended at the corresponding ages.

[0228] In a preferred embodiment, double-blind randomized, placebo-controlled clinical trials are used. In a specific embodiment, a computer generated randomization schedule is used. For example, each subject in the study will be enrolled as a single unit and assigned a unique case number. Multiple subjects within a single family will be treated as individuals for the purpose of enrollment. Parent/guardian, subjects, and investigators will remain blinded to which treatment group subjects have been assigned for the duration of the study. Serologic and virologic studies will be performed by laboratory personnel blinded to treatment group assignment. However, it is expected that isolation of the vaccine virus from nasal wash fluid obtained after vaccination will identify likely vaccinees to the virology laboratory staff. The serologic and virologic staff are separate and the serology group will be prevented from acquiring any knowledge of the culture results.

[0229] Each volunteer is preferably monitored for at least 12 hours prior to receiving the recombinant virus of the invention and/or a vaccine of the invention, and each volunteer will be monitored for at least fifteen minutes after receiving the dose at a clinical site. Then volunteers are monitored as outpatients on days 1-14, 21, 28, 35, 42, 49, and 56 postdose. In a preferred embodiment, the volunteers are monitored for the first month after each vaccination as outpatients. All vaccine related serious adverse events will be reported for the entire duration of the trial. A serious adverse event is defined as an event that 1) results in death, 2) is immediately life threatening, 3) results in permanent or substantial disability, 4) results in or prolongs an existing in-patient hospitalization, 5) results in a congenital anomaly, 6) is a cancer, or 7) is the result of an overdose of the study vaccine. Serious adverse events that are not vaccine related will be reported beginning on the day of the first vaccination (Day 0) and continue for 30 days following the last vaccination. Non-vaccine related serious adverse events will not be reported for 5 to 8 months after the 30 day reporting period following the last vaccination. A dose of vaccine/placebo will not be given if a child has a vaccine-related serous adverse event following the previous dose. Any adverse event that is not considered vaccine related, but which is of concern, will be discussed by the clinical study monitor and the medical monitor before the decision to give another dose is made.

[0230] Blood samples are collected via an indwelling catheter or direct venipuncture (e.g., by using 10 ml red-top Vacutainer tubes) at the following intervals: (1) prior to administering the dose of the recombinant virus of the invention and/or a vaccine of the invention; (2) during the administration of the dose of the recombinant virus of the invention and/or a vaccine of the invention; (3) 5 minutes, 10 minutes, 15 minutes, 20 minutes, 30 minutes, 1 hour, 2 hours, 4 hours, 8 hours, 12 hours, 24 hours, and 48 hours after administering the dose of the recombinant virus of the invention and/or a vaccine of the invention; and (4) 3 days, 7 days 14 days, 21 days, 28 days, 35 days, 42 days, 49 days, and 56 days after administering the dose of the recombinant virus of the invention and/or a vaccine of the invention. In a specific embodiment, a total of 5 blood draws (3-5 ml each) are obtained, each just prior to the first, third and booster doses and approximately one month following the third dose and booster dose of administration of the vaccine or placebo. Samples are allowed to clot at room temperature and the serum is collected after centrifugation.

[0231] Sera are tested for strain-specific serum hemaglutination inhibition (HAI) antibody levels against the virus of the invention. Other indicators of immunogenicity such as IgG, IgA, or neutralizing antibodies are also tested. Serum antibody responses to one or more of the other vaccines given concurrently may be measured. The amount of antibodies generated against the recombinant virus of the invention and/or a vaccine of the invention in the samples from the patients can be quantitated by ELISA.

[0232] The concentration of antibody levels in the serum of volunteers are corrected by subtracting the predose serum level (background level) from the serum levels at each collection interval after administration of the dose of recombinant virus of the invention and/or a vaccine of the invention. For each volunteer the pharmacokinetic parameters are computed according to the model-independent approach (Gibaldi et al., eds., 1982, Pharmacokinetics, 2^{nd} edition, Marcel Dekker, New York) from the corrected serum antibody or antibody fragment concentrations.

[0233] Nasal washes obtained approximately 2, 3, 4, 5, 6, 7 or 8 days after each doses of vaccine/placebo will be cultured to detect shedding of the vaccine virus of the invention. In a preferred embodiment, nasal washes obtained 7 days after each doses of vaccine/placebo are cultured. A nasopharyngeal swab, a throat swab, or a nasal wash is also used to determine the presence of other viruses in volunteers with medically attended febrile illness (rectal temperature greater than or equal to 102° F.) and/or croup, bronchiolitis, or pneumonia at any time during the study. Samples are shipped on dry ice to designated site for study. Assays for isolation and quantitation of the vaccine virus of the invention and immunostaining assays using MAb to identify the vaccine virus of the invention are used (examples of such assays are given in the Example sections, infra). Nasal wash specimens may be tested for other viruses and immune responses including IgG, IgA, and neutralizing antibody.

[0234] 5.5.6. Reporter Genes

[0235] In certain embodiments, assays for measurement of reporter gene expression in tissue culture or in animal models can be used with the methods of the invention. The nucleotide sequence of the reporter gene is cloned into the virus, such as bPIV, hPIV, or b/hPIV3, wherein (i) the position of the reporter gene is changed and (ii) the length of the intergenic regions flanking the reporter gene are varied. Different combinations are tested to determine the optimal rate of expression of the reporter gene and the optimal replication rate of the virus comprising the reporter gene.

[0236] In certain embodiments, minigenome constructs are generated to include a reporter gene. The construction of minigenome constructs is described in section 5.5.1.

[0237] The abundance of the reporter gene product can be determined by any technique known to the skilled artisan. Such techniques include, but are not limited to, Northern blot analysis or Western blot analysis using probes or antibodies, respectively, that are specific to the reporter gene.

[0238] In certain embodiments, the reporter gene emits a fluorescent signal that can be detected in a FACS. FACS can be used to detect cells in which the reporter gene is expressed.

[0239] Techniques for practicing the specific aspect of this invention will employ, unless otherwise indicated, conventional techniques of molecular biology, microbiology, and recombinant DNA manipulation and production, which are routinely practiced by one of skill in the art. See, e.g., Sambrook, 1989, Molecular Cloning, A Laboratory Manual, Second Edition; DNA Cloning, Volumes I and II (Glover, Ed. 1985); and Transcription and Translation (Hames & Higgins, Eds. 1984). The biochemical activity of the reporter gene product represents the expression level of the reporter gene. The total level of reporter gene activity depends also on the replication rate of the recombinant virus of the invention. Thus, to determine the true expression level of the reporter gene from the recombinant virus, the total expression level should be divided by the titer of the recombinant virus in the cell culture or the animal model.

[0240] Reporter genes that can be used with the methods of invention include, but are not limited to, the genes listed in the Table 4 below:

TABLE 4
Reporter genes and the biochemical properties of the
respective reporter gene products

| Reporter Gene | Protein Activity & Measurement |
|---|---|
| CAT (chloramphenicol | Transfers radioactive acetyl groups to |
| acetyltransferase) | chloramphenicol or detection by thin layer |
| | chromatography and autoradiography |
| GAL (b-galactosidase) | Hydrolyzes colorless galactosides to yield |
| | colored products. |
| GUS (b-glucuronidase) | Hydrolyzes colorless glucuronides to yield |
| | colored products. |
| LUC (luciferase) | Oxidizes luciferin, emitting photons |
| GFP (green fluorescent | fluorescent protein without substrate |
| protein) | |
| SEAP (secreted alkaline | luminescence reaction with suitable |
| phosphatase) | substrates or with substrates that generate |
| | chromophores |
| HRP (horseradish | in the presence of hydrogen oxide, oxidation |
| peroxidase) | of 3,3′,5,5′-tetramethylbenzidine to form a |
| | colored complex |
| AP (alkaline | luminescence reaction with suitable |
| phosphatase) | substrates or with substrates that generate |
| | chromophores |

[0241] The abundance of the reporter gene can be measured by, inter alia, Western blot analysis or Northern blot analysis or any other technique used for the quantification of transcription of a nucleotide sequence, the abundance of its mRNA its protein (see Short Protocols in Molecular Biology, Ausubel et al. (editors), John Wiley & Sons, Inc., 4^{th} edition, 1999). In certain embodiments, the activity of the reporter gene product is measured as a readout of reporter gene expression from the recombinant virus. For the quantification of the activity of the reporter gene product, biochemical characteristics of the reporter gene product can be investigated (see Table 1). The methods for measuring the biochemical activity of the reporter gene products are well-known to the skilled artisan. A more detailed description of illustrative reporter genes that can be used with the methods of the invention is set forth below.

[0242] Luciferase

[0243] Luciferases are enzymes that emit light in the presence of oxygen and a substrate (luciferin) and which have been used for real-time, low-light imaging of gene expression in cell cultures, individual cells, whole organisms, and transgenic organisms (reviewed by Greer & Szalay, 2002, Luminescence 17(1):43-74).

[0244] As used herein, the term “luciferase” as used in relation to the invention is intended to embrace all luciferases, or recombinant enzymes derived from luciferases that have luciferase activity. The luciferase genes from fireflies have been well characterized, for example, from the Photinus and Luciola species (see, e.g., International Patent Publication No. WO 95/25798 for Photinus pyralis, European Patent Application No. EP 0 524 448 for Luciola cruciata and Luciola lateralis, and Devine et al., 1993, Biochim. Biophys. Acta 1173(2):121-132 for Luciola mingrelica. Other eucaryotic luciferase genes include, but are not limited to, the sea panzy (Renilla reniformis, see, e.g., Lorenz et al., 1991, Proc Natl Acad Sci USA 88(10):4438-4442), and the glow worm (Lampyris noctiluca, see e.g., Sula-Newby et al., 1996, Biochem J. 313:761-767). Bacterial luciferin-luciferase systems include, but are not limited to, the bacterial lux genes of terrestrial Photorhabdus luminescens (see, e.g., Manukhov et al., 2000, Genetika 36(3):322-30) and marine bacteria Vibrio fischeri and Vibrio harveyi (see, e.g., Miyamoto et al., 1988, J Biol Chem. 263(26):13393-9, and Cohn et al., 1983, Proc Natl Acad Sci USA., 80(1):120-3, respectively). The luciferases encompassed by the present invention also includes the mutant luciferases described in U.S. Pat. No. 6,265,177 to Squirrell et al., which is hereby incorporated by reference in its entirety.

[0245] Green Fluorescent Protein

[0246] Green fluorescent protein (“GFP”) is a 238 amino acid protein with amino acids 65 to 67 involved in the formation of the chromophore that does not require additional substrates or cofactors to fluoresce (see, e.g., Prasher et al., 1992, Gene 111:229-233; Yang et al., 1996, Nature Biotechnol. 14:1252-1256; and Cody et al., 1993, Biochemistry 32:1212-1218).

[0247] As used herein, the term “green fluorescent protein” or “GFP” as used in relation to the invention is intended to embrace all GFPs (including the various forms of GFPs that exhibit colors other than green), or recombinant enzymes derived from GFPs that have GFP activity. The native gene for GFP was cloned from the bioluminescent jellyfish Aequorea victoria (see, e.g., Morin et al., 1972, J. Cell Physiol. 77:313-318). Wild type GFP has a major excitation peak at 395 nm and a minor excitation peak at 470 nm. The absorption peak at 470 nm allows the monitoring of GFP levels using standard fluorescein isothiocyanate (FITC) filter sets. Mutants of the GFP gene have been found useful to enhance expression and to modify excitation and fluorescence. For example, mutant GFPs with alanine, glycine, isoleucine, or threonine substituted for serine at position 65 result in mutant GFPs with shifts in excitation maxima and greater fluorescence than wild type protein when excited at 488 nm (see, e.g., Heim et al., 1995, Nature 373:663-664); U.S. Pat. No. 5,625,048; Delagrave et al., 1995, Biotechnology 13:151-154; Cormack et al., 1996, Gene 173:33-38; and Cramer et al., 1996, Nature Biotechnol. 14:315-319). The ability to excite GFP at 488 nm permits the use of GFP with standard fluorescence activated cell sorting (“FACS”) equipment. In another embodiment, GFPs are isolated from organisms other than the jellyfish, such as, but not limited to, the sea pansy, Renilla reriformis.

[0248] EGFP is a red-shifted variant of wild-type GFP (3-5) which has been optimized for brighter fluorescence and higher expression in mammalian cells. (Excitation maximum=488 nm; emission maximum=507 nm.) EGFP encodes the GFPmut1 variant which contains the double-amino-acid substitution of Phe-64 to Leu and Ser-65 to Thr. The coding sequence of the EGFP gene contains more than 190 silent base changes which correspond to human codon-usage preferences.

[0249] Beta Galactosidase

[0250] Beta galactosidase (“β-gal”) is an enzyme that catalyzes the hydrolysis of b-galactosides, including lactose, and the galactoside analogs o-nitrophenyl-β-D-galactopyranoside (“ONPG”) and chlorophenol red-b-D-galactopyranoside (“CPRG”) (see, e.g., Nielsen et al., 1983 Proc Natl Acad Sci USA 80(17):5198-5202; Eustice et al., 1991, Biotechniques 11:739-742; and Henderson et al., 1986, Clin. Chem. 32:1637-1641). The β-gal gene functions well as a reporter gene because the protein product is extremely stable, resistant to proteolytic degradation in cellular lysates, and easily assayed. When ONPG is used as the substrate, β-gal activity can be quantitated with a spectrophotometer or a microplate reader.

[0251] As used herein, the term “beta galactosidase” or “β-gal” as used in relation to the invention is intended to embrace all b-gals, including lacZ gene products, or recombinant enzymes derived from b-gals which have b-gal activity. The b-gal gene functions well as a reporter gene because the protein product is extremely stable, resistant to proteolytic degradation in cellular lysates, and easily assayed. In an embodiment where ONPG is the substrate, b-gal activity can be quantitated with a spectrophotometer or microplate reader to determine the amount of ONPG converted at 420 nm. In an embodiment when CPRG is the substrate, b-gal activity can be quantitated with a spectrophotometer or microplate reader to determine the amount of CPRG converted at 570 to 595 nm.

[0252] Chloramphenicol Acetyltransferase

[0253] Chloramphenicol acetyl transferase (“CAT”) is commonly used as a reporter gene in mammalian cell systems because mammalian cells do not have detectable levels of CAT activity. The assay for CAT involves incubating cellular extracts with radiolabeled chloramphenicol and appropriate co-factors, separating the starting materials from the product by, for example, thin layer chromatography (“TLC”), followed by scintillation counting (see, e.g., U.S. Pat. No. 5,726,041, which is hereby incorporated by reference in its entirety).

[0254] As used herein, the term “chloramphenicol acetyltransferase” or “CAT” as used in relation to the invention is intended to embrace all CATs, or recombinant enzymes derived from CAT which have CAT activity. While it is preferable that a reporter system which does not require cell processing, radioisotopes, and chromatographic separations would be more amenable to high through-put screening, CAT as a reporter gene may be preferable in situations when stability of the reporter gene is important. For example, the CAT reporter protein has an in vivo half life of about 50 hours, which is advantageous when an accumulative versus a dynamic change type of result is desired.

[0255] Secreted Alkaline Phosphatase

[0256] The secreted alkaline phosphatase (“SEAP”) enzyme is a truncated form of alkaline phosphatase, in which the cleavage of the transmembrane domain of the protein allows it to be secreted from the cells into the surrounding media.

[0257] As used herein, the term “secreted alkaline phosphatase” or “SEAP” as used in relation to the invention is intended to embrace all SEAP or recombinant enzymes derived from SEAP which have alkaline phosphatase activity. SEAP activity can be detected by a variety of methods including, but not limited to, measurement of catalysis of a fluorescent substrate, immunoprecipitation, HPLC, and radiometric detection. The luminescent method is preferred due to its increased sensitivity over calorimetric detection methods. The advantages of using SEAP is that a cell lysis step is not required since the SEAP protein is secreted out of the cell, which facilitates the automation of sampling and assay procedures. A cell-based assay using SEAP for use in cell-based assessment of inhibitors of the Hepatitis C virus protease is described in U.S. Pat. No. 6,280,940 to Potts et al. which is hereby incorporated by reference in its entirety.

[0258] 5.5.7. Cell Culture Systems, Embryonated Eggs, and Animal Models

[0259] Cell culture systems known in the art can be used to propagate or test activities of the viruses of the present invention. (See e.g., Flint et al., PRINCIPLES OF VIROLOGY, MOLECULAR BIOLOGY, PATHOGENESIS, AND CONTROL, 2000, ASM Press pp25-29, the entire text is incorporated herein by reference). Examples of such cell culture systems include, but are not limited to, primary cell culture that are prepared from animal tissues (e.g., cell cultures derived from monkey kidney, human embryonic amnion, kidney, and foreskin, and chicken or mouse embryos); diploid cell strains that consist of a homogeneous population of a single type and can divide up to 100 times before dying (e.g., cell culture derived from human embryos, such as the WI-38 strain derived from human embryonic lung); and continuous cell lines consist of a single cell type that can be propagated indefinitely in culture (e.g., HEp-2 cells, Hela cells, Vero cells, L and 3T3 cells, and BHK-21 cells).

[0260] Viruses of the invention can also be propagated in embryonated chicken eggs. At 5 to 14 days after fertilization, a hole is drilled in the shell and virus is injected into the site appropriate for its replication.

[0261] Any animal models known in the art can be used in the present invention to accomplish various purposes, such as to determine the effectiveness and safeness of vaccines of the invention. Examples of such animal models include, but are not limited to, cotton rats (Sigmodon hispidis), hamsters, mice, monkeys, and chimpanzees. In a preferred embodiment, Syrian Golden hamsters are used.

[0262] 5.5.8. Neutralization Assay

[0263] Neutralization assays can be carried out to address the important safety issue of whether the heterologous surface glycoproteins are incorporated into the virion which may result in an altered virus tropism phenotype. As used herein, the term “tropism” refers to the affinity of a virus for a particular cell type. Tropism is usually determined by the presence of cell receptors on specific cells which allow a virus to enter that and only that particular cell type. A neutralization assay is performed by using either MAbs of the heterologous surface glycoprotein (non-limiting example is the F protein of a negative strand RNA virus) or polyclonal antiserum comprising antibodies against the heterologous surface glycoprotein. Different dilution of the antibodies are tested to see whether the chimeric virus of the invention can be neutralized. The heterologous surface glycoprotein should not be present on the virion surface in an amount sufficient to result in antibody binding and neutralization.

[0264] 5.5.9. Sucrose Gradient Assay

[0265] The question of whether the heterologous proteins are incorporated into the virion can be further investigated by use of a biochemical assay. Infected cell lysates can be fractionated in 20-60% sucrose gradients, various fractions are collected and analyzed for the presence and distribution of heterologous proteins and the vector proteins by Western blot. The fractions and the virus proteins can also be assayed for peak virus titers by plaque assay. Examples of sucrose gradient assay are given in section 23, infra. When the heterologous proteins are associated with the virion, they will co-migrate with the virion.

[0266] 5.6. Vaccine Formulations Using the Chimeric Viruses

[0267] The invention encompasses vaccine formulations comprising the engineered negative strand RNA virus of the present invention. The recombinant PIV viruses of the present invention may be used as a vehicle to express foreign epitopes that induce a protective response to any of a variety of pathogens. In a specific embodiment, the invention encompasses the use of recombinant bPIV viruses or attenuated hPIV that have been modified in vaccine formulations to confer protection against hPIV infection.

[0268] The vaccine preparations of the invention encompass multivalent vaccines, including bivalent and trivalent vaccine preparations. The bivalent and trivalent vaccines of the invention may be administered in the form of one PIV vector expressing each heterologous antigenic sequence or two or more PIV vectors each encoding different heterologous antigenic sequences. For example, a first chimeric PIV expressing one or more heterologous antigenic sequences can be administered in combination with a second chimeric PIV expressing one or more heterologous antigenic sequences, wherein the heterologous antigenic sequences in the second chimeric PIV are different from the heterologous antigenic sequences in the first chimeric PIV. The heterologous antigenic sequences in the first and the second chimeric PIV can be derived from the same virus but encode different proteins, or derived from different viruses. In a preferred embodiment, the heterologous antigenic sequences in the first chimeric PIV are derived from respiratory syncytial virus, and the heterologous antigenic sequences in the second chimeric PIV are derived from human metapneumovirus. In another preferred embodiment, the heterologous antigenic sequences in the first chimeric PIV are derived from respiratory syncytial virus, and the heterologous antigenic sequences in the second chimeric PIV are derived from avian pneumovirus.

[0269] In certain preferred embodiments, the vaccine formulation of the invention is used to protect against infections caused by a negative strand RNA virus, including but not limited to, influenza virus, parainfluenza virus, respiratory syncytial virus, and mammalian metapneumovirus (e.g., human metapneumovirus). More specifically, the vaccine formulation of the invention is used to protect against infections by a human metapneumovirus and/or an avian pneumovirus. In certain embodiments, the vaccine formulation of the invention is used to protect against infections by (a) a human metapneumovirus and a respiratory syncytial virus; and/or (b) an avian pneumovirus and a respiratory syncytial virus.

[0270] In a preferred embodiment, the invention provides a proteinaceous molecule or metapneumovirus-specific viral protein or functional fragment thereof encoded by a nucleic acid according to the invention. Useful proteinaceous molecules are for example derived from any of the genes or genomic fragments derivable from a virus according to the invention. Particularly useful are the F, SH and/or G protein or antigenic fragments thereof for inclusion as antigen or subunit immunogen, but inactivated whole virus can also be used. Particularly useful are also those proteinaceous substances that are encoded by recombinant nucleic acid fragments that are identified for phylogenetic analyses, of course preferred are those that are within the preferred bounds and metes of ORFs useful in phylogenetic analyses, in particular for eliciting MPV specific antibody or T cell responses, whether in vivo (e.g. for protective purposes or for providing diagnostic antibodies) or in vitro (e.g. by phage display technology or another technique useful for generating synthetic antibodies).

[0271] A pharmaceutical composition comprising a virus, a nucleic acid, a proteinaceous molecule or fragment thereof, an antigen and/or an antibody according to the invention can for example be used in a method for the treatment or prevention of a MPV infection and/or a respiratory illness comprising providing an individual with a pharmaceutical composition according to the invention. This is most useful when said individual is a human, specifically when said human is below 5 years of age, since such infants and young children are most likely to be infected by a human MPV as provided herein. Generally, in the acute phase patients will suffer from upper respiratory symptoms predisposing for other respiratory and other diseases. Also lower respiratory illnesses may occur, predisposing for more and other serious conditions. The compositions of the invention can be used for the treatment of immuno-compromised individuals including cancer patients, transplant recipients and the elderly.

[0272] The invention also provides methods to obtain an antiviral agent useful in the treatment of respiratory tract illness comprising establishing a cell culture or experimental animal comprising a virus according to the invention, treating said culture or animal with an candidate antiviral agent, and determining the effect of said agent on said virus or its infection of said culture or animal. The invention also provides use of an antiviral agent according to the invention for the preparation of a pharmaceutical composition, in particular for the preparation of a pharmaceutical composition for the treatment of respiratory tract illness, specifically when caused by an MPV infection or related disease, and provides a pharmaceutical composition comprising an antiviral agent according to the invention, useful in a method for the treatment or prevention of an MPV infection or respiratory illness, said method comprising providing an individual with such a pharmaceutical composition.

[0273] In certain embodiments of the invention, the vaccine of the invention comprises mammalian metapneumovirus. In certain, more specific embodiments, the mammalian metapneumovirus is a human metapneumovirus. In a preferred embodiment, the mammalian metapneumovirus to be used in a vaccine formulation has an attenuated phenotype. For methods to achieve an attenuated phenotype, see section 5.4.

[0274] The invention provides vaccine formulations for the prevention and treatment of infections with PIV, RSV, APV, and/or hMPV. In certain embodiments, the vaccine of the invention comprises recombinant and chimeric viruses of the invention. In certain embodiments, the virus is attenuated.

[0275] In a specific embodiment, the vaccine comprises APV and the vaccine is used for the prevention and treatment for hMPV infections in humans. Without being bound by theory, because of the high degree of homology of the F protein of APV with the F protein of hMPV, infection with APV will result in the production of antibodies in the host that will cross-react with hMPV and protect the host from infection with hMPV and related diseases.

[0276] In another specific embodiment, the vaccine comprises hMPV and the vaccine is used for the prevention and treatment for APV infection in birds, such as, but not limited to, in turkeys. Without being bound by theory, because of the high degree of homology of the F protein of APV with the F protein of hMPV, infection with hMPV will result in the production of antibodies in the host that will cross-react with APV and protect the host from infection with APV and related diseases.

[0277] In certain embodiments, the vaccine formulation of the invention is used to protect against infections by (a) a human metapneumovirus and a human parainfluenza virus; and/or (b) an avian pneumovirus and a human parainfluenza virus and related diseases.

[0278] In certain embodiments, the vaccine formulation of the invention is used to protect against infections by (a) a human metapneumovirus, a respiratory syncytial virus, and a human parainfluenza virus; and/or (b) an avian pneumovirus, a respiratory syncytial virus, and a human parainfluenza virus and related diseases.

[0279] In certain embodiments, the vaccine formulation of the invention is used to protect against infections by a human metapneumovirus, a respiratory syncytial virus, and a human parainfluenza virus. In certain other embodiments, the vaccine formulation of the invention is used to protect against infections by an avian pneumovirus, a respiratory syncytial virus, and a human parainfluenza virus, and related diseases.

[0280] Due to the high degree of homology among the F proteins of different viral species, for exemplary amino acid sequence comparisons see FIG. 1, the vaccine formulations of the invention can be used for protection from viruses different from the one from which the heterologous nucleotide sequence encoding the F protein was derived. In a specific exemplary embodiment, a vaccine formulation contains a virus comprising a heterologous nucleotide sequence derived from an avian pneumovirus type A, and the vaccine formulation is used to protect from infection by avian pneumovirus type A and avian pneumovirus type B. In another specific exemplary embodiment, a vaccine formulation contains a virus comprising a heterologous nucleotide sequence derived from an avian pneumovirus subgroup C, and the vaccine formulation is used to protect from infection by avian pneumovirus subgroup C and avian pneumovirus subgroup D.

[0281] The invention encompasses vaccine formulations to be administered to humans and animals that are useful to protect against PIV, hMPV, APV (including APV C and APV D), influenza, RSV, Sendai virus, mumps, laryngotracheitis virus, simianvirus 5, human papillomavirus, as well as other viruses, pathogens and related diseases. The invention further encompasses vaccine formulations to be administered to humans and animals that are useful to protect against human metapneumovirus infections, avian pneumovirus infections, and related diseases.

[0282] In one embodiment, the invention encompasses vaccine formulations that are useful against domestic animal disease causing agents including rabies virus, feline leukemia virus (FLV) and canine distemper virus. In yet another embodiment, the invention encompasses vaccine formulations that are useful to protect livestock against vesicular stomatitis virus, rabies virus, rinderpest virus, swinepox virus, and further, to protect wild animals against rabies virus.

[0283] Attenuated viruses generated by the reverse genetics approach can be used in the vaccine and pharmaceutical formulations described herein. Reverse genetics techniques can also be used to engineer additional mutations to other viral genes important for vaccine production. For example, mutations in the 5′ non-coding region may affect mRNA translation, mutations in capsid proteins are believed to influence viral assembly, and temperature-sensitive and cold-adapted mutants are often less pathogenic than the parental virus. (see, e.g., Flint et al., PRINCIPLES OF VIROLOGY, MOLECULAR BIOLOGY, PATHOGENESIS, AND CONTROL, 2000, ASM Press pp 670-683, the entire text is incorporated herein by reference). The epitopes of useful vaccine strain variants can be engineered into the attenuated virus. Alternatively, completely foreign epitopes, including antigens derived from other viral or non-viral pathogens can be engineered into the attenuated strain. For example, antigens of non-related viruses such as HIV (gp160, gp120, gp41), parasite antigens (e.g., malaria), bacterial or fungal antigens, or tumor antigens can be engineered into the attenuated strain. Alternatively, epitopes which alter the tropism of the virus in vivo can be engineered into the chimeric attenuated viruses of the invention.

[0284] Virtually any heterologous gene sequence may be constructed into the chimeric viruses of the invention for use in vaccines. Preferably, moieties and peptides that act as biological response modifiers are constructed into the chimeric viruses of the invention for use in vaccines. Preferably, epitopes that induce a protective immune response to any of a variety of pathogens, or antigens that bind neutralizing antibodies may be expressed by or as part of the chimeric viruses. For example, heterologous gene sequences that can be constructed into the chimeric viruses of the invention include, but are not limited to influenza and parainfluenza hemagglutinin neuraminidase and fusion glycoproteins such as the HN and F genes of human PIV3. In yet another embodiment, heterologous gene sequences that can be engineered into the chimeric viruses include those that encode proteins with immunomodulating activities. Examples of immunomodulating proteins include, but are not limited to, cytokines, interferon type 1, gamma interferon, colony stimulating factors, interleukin-1, -2, -4, -5, -6, -12, and antagonists of these agents.

[0285] In addition, heterologous gene sequences that can be constructed into the chimeric viruses of the invention for use in vaccines include but are not limited to sequences derived from a human immunodeficiency virus (HIV), preferably type 1 or type 2. In a preferred embodiment, an immunogenic HIV-derived peptide that may be the source of an antigen may be constructed into a chimeric PIV that may then be used to elicit a vertebrate immune response. Such HIV-derived peptides may include, but are not limited to, sequences derived from the env gene (i.e., sequences encoding all or part of gp160, gp120, and/or gp41), the pol gene (i.e., sequences encoding all or part of reverse transcriptase, endonuclease, protease, and/or integrase), the gag gene (i.e., sequences encoding all or part of p7, p6, p55, p17/18, p24/25), tat, rev, nef, vif, vpu, vpr, and/or vpx.

[0286] Other heterologous sequences may be derived from hepatitis B virus surface antigen (HBsAg); hepatitis A or C virus surface antigens, the glycoproteins of Epstein Barr virus; the glycoproteins of human papillomavirus; the glycoproteins of respiratory syncytial virus, parainfluenza virus, Sendai virus, simianvirus 5 or mumps virus; the glycoproteins of influenza virus; the glycoproteins of herpesviruses; VP1 of poliovirus; antigenic determinants of non-viral pathogens such as bacteria and parasites, to name but a few. In another embodiment, all or portions of immunoglobulin genes may be expressed. For example, variable regions of anti-idiotypic immunoglobulins that mimic such epitopes may be constructed into the chimeric viruses of the invention.

[0287] Other heterologous sequences may be derived from tumor antigens, and the resulting chimeric viruses can be used to generate an immune response against the tumor cells leading to tumor regression in vivo. These vaccines may be used in combination with other therapeutic regimens, including but not limited to, chemotherapy, radiation therapy, surgery, bone marrow transplantation, etc. for the treatment of tumors. In accordance with the present invention, recombinant viruses may be engineered to express tumor-associated antigens (TAAs), including but not limited to, human tumor antigens recognized by T cells (Robbins and Kawakami, 1996, Curr. Opin. Immunol. 8:628-636, incorporated herein by reference in its entirety), melanocyte lineage proteins, including gp101, MART-1/MelanA, TRP-1 (gp75), tyrosinase; Tumor-specific widely shared antigens, MAGE-1, MAGE-3, BAGE, GAGE-1, GAGE-1, N-acetylglucosaminyltransferase-V, p15; Tumor-specific mutated antigens, β-catenin, MUM-1, CDK4; Nonmelanoma antigens for breast, ovarian, cervical and pancreatic carcinoma, HER-2/neu, human papillomavirus-E6, -E7, MUC-1.

[0288] In even other embodiments, a heterologous nucleotide sequence is derived from a metapneumovirus, such as human metapneumovirus and/or avian pneumovirus. In even other embodiments, the virus of the invention contains two different heterologous nucleotide sequences wherein one is derived from a metapneumovirus, such as human metapneumovirus and/or avian pneumovirus, and the other one is derived from a respiratory syncytial virus. The heterologous nucleotide sequence encodes a F protein or a G protein of the respective virus. In a specific embodiment, a heterologous nucleotide sequences encodes a chimeric F protein, wherein the chimeric F protein contains the ectodomain of a F protein of a metapneumovirus and the transmembrane domain as well as the luminal domain of a F protein of a parainfluenza virus.

[0289] Either a live recombinant viral vaccine or an inactivated recombinant viral vaccine can be formulated. A live vaccine may be preferred because multiplication in the host leads to a prolonged stimulus of similar kind and magnitude to that occurring in natural infections, and therefore, confers substantial, long-lasting immunity. Production of such live recombinant virus vaccine formulations may be accomplished using conventional methods involving propagation of the virus in cell culture or in the allantois of the chick embryo followed by purification. Additionally, as bPIV has been demonstrated to be non-pathogenic in humans, this virus is highly suited for use as a live vaccine.

[0290] In this regard, the use of genetically engineered PIV (vectors) for vaccine purposes may desire the presence of attenuation characteristics in these strains. The introduction of appropriate mutations (e.g., deletions) into the templates used for transfection may provide the novel viruses with attenuation characteristics. For example, specific missense mutations that are associated with temperature sensitivity or cold adaption can be made into deletion mutations. These mutations should be more stable than the point mutations associated with cold or temperature sensitive mutants and reversion frequencies should be extremely low.

[0291] Alternatively, chimeric viruses with “suicide” characteristics may be constructed. Such viruses would go through only one or a few rounds of replication within the host. When used as a vaccine, the recombinant virus would go through limited replication cycle(s) and induce a sufficient level of immune response but it would not go further in the human host and cause disease. Recombinant viruses lacking one or more of the PIV genes or possessing mutated PIV genes would not be able to undergo successive rounds of replication. Defective viruses can be produced in cell lines which permanently express such a gene(s). Viruses lacking an essential gene(s) would be replicated in these cell lines, however, when administered to the human host, they would not be able to complete a round of replication. Such preparations may transcribe and translate—in this abortive cycle—a sufficient number of genes to induce an immune response. Alternatively, larger quantities of the strains could be administered, so that these preparations serve as inactivated (killed) virus vaccines. For inactivated vaccines, it is preferred that the heterologous gene product be expressed as a viral component, so that the gene product is associated with the virion. The advantage of such preparations is that they contain native proteins and do not undergo inactivation by treatment with formalin or other agents used in the manufacturing of killed virus vaccines. Alternatively, mutated PIV made from cDNA may be highly attenuated so that it replicates for only a few rounds.

[0292] In certain embodiments, the vaccine of the invention comprises an attenuated virus. Without being bound by theory, the attenuated virus can be effective as a vaccine even if the attenuated virus is incapable of causing a cell to generate new infectious viral particles because the viral proteins are inserted in the cytoplasmic membrane of the host thus stimulating an immune response.

[0293] In another embodiment of this aspect of the invention, inactivated vaccine formulations may be prepared using conventional techniques to “kill” the chimeric viruses. Inactivated vaccines are “dead” in the sense that their infectivity has been destroyed. Ideally, the infectivity of the virus is destroyed without affecting its immunogenicity. In order to prepare inactivated vaccines, the chimeric virus may be grown in cell culture or in the allantois of the chick embryo, purified by zonal ultracentrifugation, inactivated by formaldehyde or β-propiolactone, and pooled. The resulting vaccine is usually inoculated intramuscularly.

[0294] Inactivated viruses may be formulated with a suitable adjuvant in order to enhance the immunological response. Such adjuvants may include but are not limited to mineral gels, e.g., aluminum hydroxide; surface active substances such as lysolecithin, pluronic polyols, polyanions; peptides; oil emulsions; and potentially useful human adjuvants such as BCG, Corynebacterium parvum, ISCOMS, and virosomes.

[0295] Many methods may be used to introduce the vaccine formulations described above, these include but are not limited to oral, intradermal, intramuscular, intraperitoneal, intravenous, subcutaneous, percutaneous, and intranasal and inhalation routes. It may be preferable to introduce the chimeric virus vaccine formulation via the natural route of infection of the pathogen for which the vaccine is designed.

[0296] In certain embodiments, the invention relates to immunogenic compositions. The immunogenic compositions comprise a chimeric PIV. In certain embodiments, the immunogenic composition comprises an attenuated chimeric PIV. In certain embodiments, the immunogenic composition further comprises a pharmaceutically acceptable carrier.

[0297] Various techniques may be used to evaluate the effectiveness and safeness of a vaccine according to the present invention. An effective vaccine is a vaccine that protects vaccinated individuals from illness due to pathogens, by invoking proper innate, cellular, and humoral responses with minimal side effect. The vaccine must not cause disease. Any techniques that are able to measure the replication of the virus and the immune response of the vaccinated subject may be used to evaluate the vaccine. Non-limiting examples are given in the Example sections, infra.

[0298] 5.6.1. Dosage Regimens and Administration of the Vaccines or Immunogenic Preparations of the Invention

[0299] The present invention provides vaccines and immunogenic preparations comprising chimeric PIV expressing one or more heterologous or non-native antigenic sequences. The vaccines or immunogenic preparations of the invention encompass single or multivalent vaccines, including bivalent and trivalent vaccines. The vaccines or immunogenic formulations of the invention are useful in providing protections against various viral infections. Particularly, the vaccines or immunogenic formulations of the invention provide protection against respiratory tract infections in a host.

[0300] A recombinant virus and/or a vaccine or immunogenic formulation of the invention can be administered alone or in combination with other vaccines. Preferably, a vaccine or immunogenic formulation of the invention is administered in combination with other vaccines or immunogenic formulations that provide protection against respiratory tract diseases, such as but not limited to, respiratory syncytial virus vaccines, influenza vaccines, measles vaccines, mumps vaccines, rubella vaccines, pneumococcal vaccines, rickettsia vaccines, staphylococcus vaccines, whooping cough vaccines or vaccines against respiratory tract cancers. In a preferred embodiment, the virus and/or vaccine of the invention is administered concurrently with pediatric vaccines recommended at the corresponding ages. For example, at two, four or six months of age, the virus and/or vaccine of the invention can be administered concurrently with DtaP (IM), Hib (IM), Polio (IPV or OPV) and Hepatitis B (IM). At twelve or fifteen months of age, the virus and/or vaccine of the invention can be administered concurrently with Hib (IM), Polio (IPV or OPV), MMRII® (SubQ); Varivax® (SubQ), and hepatitis B (IM). The vaccines that can be used with the methods of invention are reviewed in various publications, e.g., The Jordan Report 2000, Division of Microbiology and Infectious Diseases, National Institute of Allergy and Infectious Diseases, National Institutes of Health, United States, the content of which is incorporated herein by reference in its entirety.

[0301] A vaccine or immunogenic formulation of the invention may be administered to a subject per se or in the form of a pharmaceutical or therapeutic composition. Pharmaceutical compositions comprising an adjuvant and an immunogenic antigen of the invention (e.g., a virus, a chimeric virus, a mutated virus) may be manufactured by means of conventional mixing, dissolving, granulating, dragee-making, levigating, emulsifying, encapsulating, entrapping or lyophilizing processes. Pharmaceutical compositions may be formulated in conventional manner using one or more physiologically acceptable carriers, diluents, excipients or auxiliaries which facilitate processing of the immunogenic antigen of the invention into preparations which can be used pharmaceutically. Proper formulation is, or amongst others, dependent upon the route of administration chosen.

[0302] When a vaccine or immunogenic composition of the invention comprises adjuvants or is administered together with one or more adjuvants, the adjuvants that can be used include, but are not limited to, mineral salt adjuvants or mineral salt gel adjuvants, particulate adjuvants, microparticulate adjuvants, mucosal adjuvants, and immunostimulatory adjuvants. Examples of adjuvants include, but are not limited to, aluminum hydroxide, aluminum phosphate gel, Freund's Complete Adjuvant, Freund's Incomplete Adjuvant, squalene or squalane oil-in-water adjuvant formulations, biodegradable and biocompatible polyesters, polymerized liposomes, triterpenoid glycosides or saponins (e.g., QuilA and QS-21, also sold under the trademark STIMULON, ISCOPREP), N-acetyl-muramyl-L-threonyl-D-isoglutamine (Threonyl-MDP, sold under the trademark TERMURTIDE), LPS, monophosphoryl Lipid A (3D-MLA sold under the trademark MPL).

[0303] The subject to which the vaccine or an immunogenic composition of the invention is administered is preferably a mammal, most preferably a human, but can also be a non-human animal, including but not limited to, primates, cows, horses, sheep, pigs, fowl (e.g., chickens, turkeys), goats, cats, dogs, hamsters, mice and rodents.

[0304] Many methods may be used to introduce the vaccine or the immunogenic composition of the invention, including but not limited to, oral, intradermal, intramuscular, intraperitoneal, intravenous, subcutaneous, percutaneous, intranasal and inhalation routes, and via scarification (scratching through the top layers of skin, e.g., using a bifurcated needle).

[0305] For topical administration, the vaccine or immunogenic preparations of the invention may be formulated as solutions, gels, ointments, creams, suspensions, etc. as are well-known in the art.

[0306] For administration intranasally or by inhalation, the preparation for use according to the present invention can be conveniently delivered in the form of an aerosol spray presentation from pressurized packs or a nebulizer, with the use of a suitable propellant, e.g., dichlorodifluoromethane, trichlorofluoromethane, dichlorotetrafluoroethane, carbon dioxide or other suitable gas. In the case of a pressurized aerosol the dosage unit may be determined by providing a valve to deliver a metered amount. Capsules and cartridges of, e.g., gelatin for use in an inhaler or insufflator may be formulated containing a powder mix of the compound and a suitable powder base such as lactose or starch.

[0307] For injection, the vaccine or immunogenic preparations may be formulated in aqueous solutions, preferably in physiologically compatible buffers such as Hanks's solution, Ringer's solution, or physiological saline buffer. The solution may contain formulatory agents such as suspending, stabilizing and/or dispersing agents. Alternatively, the proteins may be in powder form for constitution with a suitable vehicle, e.g., sterile pyrogen-free water, before use.

[0308] Determination of an effective amount of the vaccine or immunogenic formulation for administration is well within the capabilities of those skilled in the art, especially in light of he detailed disclosure provided herein.

[0309] An effective dose can be estimated initially from in vitro assays. For example, a dose can be formulated in animal models to achieve an induction of an immunity response using techniques that are well known in the art. One having ordinary skill in the art could readily optimize administration to all animal species based on results described herein. Dosage amount and interval may be adjusted individually. For example, when used as an immunogenic composition, a suitable dose is an amount of the composition that when administered as described above, is capable of eliciting an antibody response. When used as a vaccine, the vaccine or immunogenic formulations of the invention may be administered in about 1 to 3 doses for a 1-36 week period. Preferably, 1 or 2 doses are administered, at intervals of about 2 weeks to about 4 months, and booster vaccinations may be given periodically thereafter. Alternate protocols may be appropriate for individual animals. A suitable dose is an amount of the vaccine formulation that, when administered as described above, is capable of raising an immunity response in an immunized animal sufficient to protect the animal from an infection for at least 4 to 12 months. In general, the amount of the antigen present in a dose ranges from about 1 pg to about 100 mg per kg of host, typically from about 10 pg to about 1 mg, and preferably from about 100 pg to about 1 μg. Suitable dose range will vary with the route of injection and the size of the patient, but will typically range from about 0.1 mL to about 5 mL.

[0310] In a specific embodiment, the viruses and/or vaccines of the invention are administered at a starting single dose of at least 10³ TCID₅₀, at least 10⁴ TCID₅₀, at least 10⁵ TCID₅₀, at least 10⁶ TCID₅₀. In another specific embodiment, the virus and/or vaccines of the invention are administered at multiple doses. In a preferred embodiment, a primary dosing regimen at 2, 4, and 6 months of age and a booster dose at the beginning of the second year of life are used. More preferably, each dose of at least 10⁵ TCID₅₀, or at least 10⁶ TCID₅₀ is given in a multiple dosing regimen. The replication rate of a virus can be used as an index to adjust the dosage of a vaccine in a clinical trial. For example, assays to test the replication rate of a virus (e.g., a growth curve, see Section 5.5. for available assays) can be used to compare the replication rate of the viruses and/or vaccines of the invention to that of the bPIV3, which was demonstrated in previous studies (see Clements et al., J. Clin. Microbiol. 29:1175-82 (1991); Karron et al., J. Infect. Dis. 171:1107-14 (1995); Karron et al., Ped. Inf. Dis. J. 5:650-654 (1996). These studies showed that a bovine PIV3 vaccine is generally safe and well tolerated by healthy human volunteers, including adults, children 6-60 months of age, and infants 2-6 months of age. In these studies, subjects have received at least a single dose of bPIV3 vaccine from 10³ TCID₅₀ to 10⁶ TCID₅₀. Twelve children received two doses of 10⁵ TCID₅₀ PIV3 vaccine instead of one dose without untoward effects.). A comparable replication rate as to bPIV3 suggests that a comparable dosage may be used in a clinical trial. A lower replication rate compared to that of bPIV3 suggests that a higher dosage can be used.

[0311] 5.6.1.1. Challenge Studies

[0312] This assay is used to determine the ability of the recombinant viruses of the invention and of the vaccines of the invention to prevent lower respiratory tract viral infection in an animal model system, such as, but not limited to, cotton rats or hamsters. The recombinant virus and/or the vaccine can be administered by intravenous (IV) route, by intramuscular (IM) route or by intranasal route (IN). The recombinant virus and/or the vaccine can be administered by any technique well-known to the skilled artisan. This assay is also used to correlate the serum concentration of antibodies with a reduction in lung titer of the virus to which the antibodies bind.

[0313] On day 0, groups of animals, such as, but not limited to, cotton rats (Sigmodon hispidis, average weight 100 g) cynomolgous macacques (average weight 2.0 kg) are administered the recombinant or chimeric virus or the vaccine of interest or BSA by intramuscular injection, by intravenous injection, or by intranasal route. Prior to, concurrently with, or subsequent to administration of the recombinant virus or the vaccine of the invention, the animals are infected with wild type virus wherein the wild type virus is the virus against which the vaccine was generated. In certain embodiments, the animals are infected with the wild type virus at least 1 day, at least 2 days, at least 3 days, at least 4 days, at least 5 days, at least 6 days, 1 week or 1 or more months subsequent to the administration of the recombinant virus and/or the vaccine of the invention.

[0314] After the infection, cotton rats are sacrificed, and their lung tissue is harvested and pulmonary virus titers are determined by plaque titration. Bovine serum albumin (BSA) 10 mg/kg is used as a negative control. Antibody concentrations in the serum at the time of challenge are determined using a sandwich ELISA. Similarly, in macacques, virus titers in nasal and lung lavages can be measured.

[0315] 5.6.1.2. Target Populations

[0316] In certain embodiments of the invention, the target population for the therapeutic and diagnostic methods of the invention is defined by age. In certain embodiments, the target population for the therapeutic and/or diagnostic methods of the invention is characterized by a disease or disorder in addition to a respiratory tract infection.

[0317] In a specific embodiment, the target population encompasses young children, below 2 years of age. In a more specific embodiment, the children below the age of 2 years do not suffer from illnesses other than respiratory tract infection.

[0318] In other embodiments, the target population encompasses patients above 5 years of age. In a more specific embodiment, the patients above the age of 5 years suffer from an additional disease or disorder including cystic fibrosis, leukaemia, and non-Hodgkin lymphoma, or recently received bone marrow or kidney transplantation.

[0319] In a specific embodiment of the invention, the target population encompasses subjects in which the hMPV infection is associated with immunosuppression of the hosts. In a specific embodiment, the subject is an immunocompromised individual.

[0320] In certain embodiments, the target population for the methods of the invention encompasses the elderly.

[0321] In a specific embodiment, the subject to be treated with the methods of the invention was infected with hMPV in the winter months.

[0322] 5.6.1.3. Clinical Trials

[0323] Vaccines of the invention or fragments thereof tested in in vitro assays and animal models may be further evaluated for safety, tolerance and pharmacokinetics in groups of normal healthy adult volunteers. The volunteers are administered intramuscularly, intravenously or by a pulmonary delivery system a single dose of a recombinant virus of the invention and/or a vaccine of the invention. Each volunteer is monitored at least 24 hours prior to receiving the single dose of the recombinant virus of the invention and/or a vaccine of the invention and each volunteer will be monitored for at least 48 hours after receiving the dose at a clinical site. Then volunteers are monitored as outpatients on days 3, 7, 14, 21, 28, 35, 42, 49, and 56 postdose.

[0324] Blood samples are collected via an indwelling catheter or direct venipuncture using 10 ml red-top Vacutainer tubes at the following intervals: (1) prior to administering the dose of the recombinant virus of the invention and/or a vaccine of the invention; (2) during the administration of the dose of the recombinant virus of the invention and/or a vaccine of the invention; (3) 5 minutes, 10 minutes, 15 minutes, 20 minutes, 30 minutes, 1 hour, 2 hours, 4 hours, 8 hours, 12 hours, 24 hours, and 48 hours after administering the dose of the recombinant virus of the invention and/or a vaccine of the invention; and (4) 3 days, 7 days 14 days, 21 days, 28 days, 35 days, 42 days, 49 days, and 56 days after administering the dose of the recombinant virus of the invention and/or a vaccine of the invention. Samples are allowed to clot at room temperature and serum will be collected after centrifugation.

[0325] The amount of antibodies generated against the recombinant virus of the invention and/or a vaccine of the invention in the samples from the patients can be quantitated by ELISA. T-cell immunity (cytotoxic and helper responses) in PBMC and lung and nasal lavages can also be monitored.

[0326] The concentration of antibody levels in the serum of volunteers are corrected by subtracting the predose serum level (background level) from the serum levels at each collection interval after administration of the dose of recombinant virus of the invention and/or a vaccine of the invention. For each volunteer the pharmacokinetic parameters are computed according to the model-independent approach (Gibaldi et al., eds., 1982, Pharmacokinetics, 2nd edition, Marcel Dekker, New York) from the corrected serum antibody or antibody fragment concentrations.

[0327] The following examples are illustrative, but not limiting, of the present invention. Cells and Viruses used in the examples are maintained as follows: the RSV A2 strain and the bovine parainfluenza type 3/human parainfluenza type 3 vectored RSV viruses (bPIV3/hPIV3/RSV viruses) were grown in Vero cells in Opti-MEM (Gibco/BRL) in the presence of gentamycin. The modified vaccinia virus Ankara (MVA-T7) or fowl-pox-T7 (FP-T7) which expressed the phage T7 RNA polymerase were grown in chicken embryonic kidney cells (SPAFAS). Vero, HeLa and Hep-2 cells were maintained in MEM (JRH Biosciences) supplemented with 10% fetal bovine serum (FBS), 2 mM L-glutamine, non-essential amino acids, and antibiotics.

### EXAMPLE 1

### Construction and Cloning of Chimeric Bovine Parainfluenza 3/Human Parainfluenza 3 cDNA

[0328] In order to substitute the F and HN genes of bPIV3 with those of hPIV3, additional restriction enzyme sites were introduced into the infectious bPIV3 cDNA. Using site-directed mutagenesis, a unique Nhe I site was introduced at nucleotide position 5041 and a Sal I site was introduced at nt 8529 of the bPIV3 cDNA. The modified full-length bPIV3 cDNA was treated with Nhe I and Sal I restriction enzymes and a 14 kb DNA fragment encompassing all of the viral bPIV3 sequences except the F and HN genes, was isolated by gel purification.

[0329] To obtain the hPIV3 F and HN gene sequences, a 10 cm dish of confluent Vero cells was infected with a strain of hPIV3 (hPIV3/Tex/12084/1983). After 3 days of incubation at 37° C., the cells were harvested and total RNA was isolated using RNA STAT-LS 50 (Tel-Test Inc.). Viral cDNA was generated by reverse transcription using a hPIV3 specific oligo annealing at position 4828 of the hPIV3 genome. The hPIV3 F and HN genes were amplified by PCR (polymerase chain reaction) using Taq polymerase. The PCR product was cloned into the pT/A TOPO cloning vector (Invitrogen) and from two clones (#11 and #14) the hPIV3 F and HN genes were sequenced. Sequence analysis revealed that for clone #11, the F gene was correct, but the HN gene contained aberrant sequences; for clone #14, the HN gene was correct, but the F gene contained aberrant stop codons. Thus, a plasmid, containing functional hPIV3 F and HN genes, was constructed by combining the correct F gene of #11 with the correct HN gene of #14 in the following manner. Both hPIV3 plasmids (#11 and #14) were digested with NheI and EcoR1. A 1.6 kb fragment harboring the correct F gene was isolated from clone #11 and a 8.5 kb fragment containing the correct HN gene and plasmid sequences, was isolated from clone #14. The two fragments were ligated to produce the intact hPIV3 F and HN genes-containing plasmid. The correct sequence was confirmed by DNA sequence analysis. Finally, a single nucleotide was added at the 3′ end of the HN gene in the untranslated region to satisfy the “Rule of Six.” The addition of the single nucleotide was accomplished by using the QuikChange mutagenesis kit (Stratagene) and was confirmed by DNA sequencing. The correct hPIV3 F and HN gene DNA fragment was then isolated by digestion with Nhe 1 and Sal 1 and a 3.5 kb DNA fragment was gel purified.

[0330] The full-length b/h PIV3 chimeric cDNA was constructed by ligating the 14.5 kb DNA fragment harboring bPIV3 sequences described above and the 3.5 kb DNA fragment containing the hPIV3 F and HN genes (see FIG. 3). The full-length chimeric plasmid DNA was confirmed by extensive restriction enzyme mapping. In addition, the M/F and HN/L gene junctions of the chimeric construct were confirmed by DNA sequencing to both contain bPIV3 and hPIV3 sequences as well as a Nhe 1 and a Sal 1 restriction enzyme site, respectively.

### EXAMPLE 2

### Construction and Cloning of Chimeric Bovine Parainfluenza 3/Human Parainfluenza 3 Vectored Respiratory Syncytial Virus F Or G cDNAs

[0331] In order to determine the effects of RSV antigen insertions in position 1 or 2 of the b/h PIV3 genome on virus replication, respiratory syncytial virus (RSV) F and G genes were cloned into different positions of the chimeric bovine parainfluenza 3/human parainfluenza 3 vector (b/h PIV3 vector). See FIG. 4.

[0332] In order to insert foreign genes into the bovine/human (b/h) PIV3 cDNA, AvrII restriction enzyme sites were introduced in the b/h PIV3 cDNA plasmid (Haller et al, 2000; 2001, this is the same construct as in Example 6) by site-directed mutagenesis using the QuickChange kit (Stratagene). One AvrII site was introduced at nucleotide (nt) 104 in the b/h PIV3 genome altering four nucleotides using the following oligo 5′GAA ATC CTA AGA CCC TAG GCA TGT TGA GTC3′ and its complement. This restriction enzyme site was used to insert the RSV genes in the first (most 3′) position of the viral genome. Another AvrII site was introduced in the N-P intergenic region at nt 1774 changing two nucleotides using the following oligo 5′CCACAACTCAATCAACCTAGGATTCATGGAAGACAATG 3′ and its complement. This restriction site was used to insert the RSV genes in the second position between the N and P genes of b/h PIV3 (FIG. 4). Full-length b/h PIV3 cDNAs harboring the AvrII sites at nts 104 and 1774 were tested for functionality by recovering viruses by reverse genetics.

[0333] Construction of RSV G cassette (N-P gene stop/start): A DNA fragment was generated that contained the bPIV3 N-P intergenic region as well as the 3′ end sequences of the RSV G gene, using the b/h PIV3 cDNA as PCR template. This fragment was generated by PCR using the following oligos: 5′CCCAACACACCACGCCAGTAGTCACAAAGAGATGACCACTATCAC3′ and 5 ′CCCAAGCTTCCTAGGTGAATCTTTGGTTGATTGAGTTGTGG3′. This fragment was then used to carry out overlapping PCR to add the bPIV3 N-P intergenic region to the RSV G gene. For the second PCR reaction, a plasmid containing the RSV G and F gene was used as a DNA template, the oligo 5′CAGCGGATCCTAGGGGAGAAAAGTGTCGAAGAAAAATGTCC3′ and an oligo generated from the short PCR fragment above were used as primers. The resulting PCR fragment containing the RSV G gene linked to the bPIV3 N-P intergenic region and flanking AvrII restriction enzyme sites, was cloned into pGEM3. The RSV G gene was sequenced to confirm the presence of an intact open reading frame and the predicted amino acid sequences. The DNA fragments harboring the RSV G gene were inserted into the first or second position using the AvrII restriction enzyme sites into a subclone harboring only the first 5200 nucleotides of the bPIV3 (1-5 bPIV3) genome that was linearized with AvrII. As used herein and other Examples, 1-5 bPIV3 refers to the nucleotide 1 to 5196 (or 5200) of bovine PIV3 genome. There is a BstB1 site at this location.

[0334] Construction of RSV F cassette (N-P gene start/stop): The RSV F gene fragment was isolated by PCR from a full-length bPIV3/RSV F+G cDNA plasmid using oligos that added AvrII sites at the 5′ and 3′ end of the RSV F gene, and introduced into the 1-5 bPIV3 plasmid harboring the AvrII site at nt 1774, which was linearized with AvrII. The bPIV3 N-P intergenic region was isolated by PCR using 1-5 bPIV3/RSV G2 as a template. The oligo 5′GACGCGTCGACCACAAAGAGATGACCACTATCACC 3′ and an oligo annealing in the bPIV3 F gene were used to generate a PCR fragment containing the bPIV3 N-P intergenic region, AvrII site, and bPIV3 sequences up to nt 5200. The PCR fragment was digested with SalI and NheI, and added to the 1-5 bPIV3 plasmid harboring the RSV F gene in position 2, which was treated with SalI and NheI. To introduce the RSV F gene containing the N-P intergenic region into position 1, the 1.8 kb RSV F cassette was excised using AvrII, and ligated into 1-5 bPIV3 containing the AvrII site at nt 104, which was linearized with AvrII.

[0335] Construction of the RSV F cassette with a short intergenic region (N stop/N start): The generation of the RSV F gene with the short N-N intergenic region was accomplished by performing a PCR reaction using 1-5 bPIV3/RSV F2 as a template, the oligo 5 ′GCGCGTCGACCAAGTAAGAAAAACTTAGGATTAAAGAACCCTAGGACTGTA3′, and an oligo annealing upstream of the 5′ end of the RSV F gene encompassing the AvrII restriction enzyme site. The PCR product containing the RSV F gene and the short N-N intergenic region, was digested with AvrII and introduced into 1-5 bPIV3 nt 104 which was linearized with AvrII.

[0336] After confirming proper orientation by restriction enzyme mapping, the plasmids harboring the RSV genes in the first position were digested with SphI and BssHII and 4 kb (1-5 bPIV3/RSV G1) or 4.8 kb (1-5 bPIV3/RSV F1) DNA fragments were isolated. In a second cloning step, the remainder of the b/h PIV3 genome was added as a SphI-BssHII 15.1 kb DNA fragment, yielding full-length cDNAs. The bPIV3 subclones, harboring the RSV genes in the second position, were cut with SphI and NheI, and 5.8 kb (bPIV3/RSV G2) and a 6.5 kb (bPIV3/RSV F2) DNA fragments were isolated. In a second cloning step, the rest of the b/h PIV3 genome was added as an NheI-SphI DNA fragment of 14 kb in size. The full-length chimeric b/h PIV3/RSV plasmids were propagated in STBL-2 cells (Gibco/BRL) that provided high yields of full-length virus cDNA plasmids.

### EXAMPLE 3

### Bovine Parainfluenza 3/Human Parainfluenza 3 Vectored Respiratory Syncytial Virus F or G Displayed A Positional Effect with Regards to mRNA Production and Protein Expression as well as Virus Replication In Vitro

[0337] Three experiments were performed to confirm the effective expression of the RSV F or G gene in the constructs of Example 2, and to determine positional effects of gene insertions in the PIV3 genome.

[0338] First, in order to demonstrate RSV protein expression by the chimeric viruses, a Western blot of chimeric virus-infected cell lysates was carried out and probed with RSV-specific antisera. See FIG. 5A. Western blots were performed as follows: Chimeric viruses were used to infect (70-80%) subconfluent Vero cells at a MOI of 0.1 or 1.0. Forty-eight hours post infection the media overlay was removed and infected monolayers were washed once with 1 ml of PBS. The cells were subsequently lysed in 400 ml of Laemmli buffer (Bio-Rad) containing 0.05% b-Mercaptoethanol (Sigma). 15 ml of each sample was separated on 12% Tris-HCl Ready Gel (Bio-Rad) and transferred to nylon membranes using a semi-dry transfer cell (Bio-Rad). Nylon membranes were rinsed in PBS [pH 7.6] containing 0.5% (v/v) Tween-20 (Sigma) (PBST) and blocked with PBST containing 5% (w/v) dry milk (PBST-M) for 20-30 minutes at room temperature. Membranes were incubated with either a mixture of RSV F monoclonal antibodies (WHO 1269, 1200, 1153, 1112, 1243, 1107) at a 1:1000 dilution in PBST-M or RSV G 10181 polyclonal antibody (Orbigen) at a 1:2000 dilution in PBST-M for 1 hour at room temperature. Following four washes with PBST, the membranes were incubated with a secondary horseradish peroxidase-conjugated goat anti-mouse antibody (Dako) at a 1:2000 dilution in PBST-M for 1 hour at room temperature. Membranes were washed 4 times with PBST and developed using a chemiluminescence substrate (Amersham Pharmacia) and exposed to Biomax Light Film (Kodak) for visualization of protein bands. Consistent with the reduced replication efficiency of b/h/RSV F 1 *N-N in Vero cells (FIG. 5C, see below), the amount of RSV F₁ detected at 48 hours post infection was about 10 times less than that present in b/h PIV3/RSV F2 or wild-type RSV A2 infected cells (compare lanes 2, 3, and 4, FIG. 5A). A 50 kDa band representing the F₁ fragment was detected in cells infected with all chimeric viruses as well as wild-type RSV. However, there was greater accumulation of a 20 kDa F fragment in infected cell lysates of chimeric viruses compared to wild-type RSV. When b/h PIV3/RSV F1*N-N infections were repeated at a higher MOI of 1.0 (FIG. 5A, lane 1), the F₁ fragment in b/h PIV3/RSV F1 infected cells accumulated to wild-type RSV levels at 48 hours post-infection. The relative amount of the 50 kDa and 20 kDa F₁ fragments in b/h PIV3/RSV F1 or b/h PIV3/RSV F2 infected cells was approximately 1:5. No F₀ was detected in cells infected with chimeric viruses indicating that the F₀ precursors were efficiently processed during b/h PIV3/RSV F1 and b/h PIV3/RSV F2 infections as was also observed in wild-type RSV infections.

[0339] The relative expression of RSV G in b/h PIV3/RSV G1, b/h PIV3/RSV G2 and wild-type RSV infected cells is shown in FIG. 5A. Both the immature and glycosylated forms of RSV G that migrated at approximately 50 kDa and 90 kDa, respectively, were detected. b/h PIV3/RSV G1 infected cells showed levels of RSV G expression similar to that seen in wild-type RSV infected cells (lanes 1 and 3, FIG. 5A). However, in b/h PIV3/RSV G2 infected cells, the accumulation of RSV G was about 2-3 times more than that present in wild-type RSV infected cells (lanes 2 and 3, FIG. 5A). Collectively, these data showed that the chimeric b/h PIV3/RSV efficiently expressed the RSV proteins in either position 1 or 2. However, the viruses harboring the RSV genes in position 2 expressed higher levels of RSV proteins.

[0340] Next, Northern blot analysis showed that the mRNA transcription correlated with the result of the protein expression demonstrated by the Western blot, see FIG. 5B. Northern blot was performed as follows: total cellular RNA was prepared from virus-infected cells using Trizol LS (Life Technologies). The RNA was further purified by one phenol-chloroform extraction and precipitated with ethanol. RNA pellets-were resuspended in diethyl pyrocarbonate-treated water and stored at −80° C. Equal amounts of total RNA were separated on 1% agarose gels containing 1% formaldehyde and transferred to nylon membranes (Amersham Pharmacia Biotech) using a Turboblotter apparatus (Schleicher & Schuell). The blots were hybridized with digoxigenin (DIG)-UTP-labeled riboprobes synthesized by in vitro transcription using a DIG RNA labeling kit (Roche Molecular Biochemicals). Hybridization was carried out at 68° C. for 12 h in Express Hyb solution (Clontech). The blots were washed at 68° C. twice with 2×SSC (1×SSC contained 0.015 M NaCl with 0.015 M sodium citrate)-0.1% sodium dodecyl sulfate (SDS) followed by one wash with 0.5×SSC-0.1% SDS and a final wash with 0.1×SSC-0.1%SDS. Signals from the hybridized probes were detected by using a DIG-Luminescent detection kit (Roche Molecular Biochemicals) and visualized by exposure to BioMax ML film (Kodak).

[0341] Northern analysis of b/h PIV3/RSV F1*N-N, b/h PIV3/RSV F2, b/h PIV3/RSV G1 and b/h PIV3/RSV G2 showed that the viral mRNA levels for RSV F or RSV G correlated well with the RSV protein levels observed (FIG. 5B). The lowest levels of RSV F mRNAs were observed for b/h PIV3/RSV F1*N-N which also displayed the least amount of RSV F protein produced. b/h PIV3/RSV G1 produced less RSV G mRNAs resulting in lower RSV G protein levels than was observed for b/h PIV3/RSV G2.

[0342] Finally, growth of different virus (with RSV F or G gene at either position 1 or position 2) correlates with the results of the protein expression and the RNA transcription. The growth curve showed in FIG. 5C was obtained as follows: Vero cells were grown to 90% confluence and infected at an MOI of 0.01 or 0.1 with b/h PIV3, b/h PIV3 RSV F1, b/h PIV3 RSV G1, b/h PIV3 RSV F2, and b/h PIV3 RSV G2. The infected monolayers were incubated at 37° C. At 0, 24, 48, 72, 96 and 120 hours post-infection, cells and media were harvested together and stored at −70° C. Virus titers for each time point harvest were determined by TCID₅₀ or plaque assays in Vero cells. TCID₅₀ assays were inspected visually for CPE following incubation at 37° C. for 6 days, while plaque assays were immunostained with RSV polyclonal antisera for quantification after 5 days of incubation.

[0343] At an MOI of 0.01 in Vero cells, the chimeric viruses harboring the RSV G or F genes in the first position (b/h PIV3 RSV G1 and b/h PIV3 RSV F1*N-N) replicated at a slower rate, yielded lower peak titers, and exhibited a greater lag phase than the viruses that contained the RSV genes in the second position. Peak titers of b/h PIV3/RSV F1*N-N and b/h PIV3/RSV G1 at 96 hours post-infection were 10^{6.7} and 10^{5.5} TCID₅₀/ml, respectively (FIG. 5C). In contrast, peak titers of b/h PIV3/RSV F2 and b/h PIV3/RSV G2 were 10^{8.0} and 10^{7.4} at 72 and 96 hours post-infection, respectively (FIG. 5C). The b/h PIV3 control virus displayed peak titers of 10^{8.0} TCID50/ml, respectively (FIG. 5C). The b/h PIV3/RSV F2 yielded 1.3 log₁₀ higher titers than b/h PIV3/RSV F1*N-N. The b/h PIV3/RSV G2 replicated to 1.9 log₁₀ higher titers than b/h PIV3/RSV G1. The results indicated that the chimeric viruses harboring the RSV genes in the first position were delayed in onset for replication in vitro compared to chimeric viruses containing the RSV genes in the second position.

[0344] To determine whether higher titers of b/h PIV3/RSV F 1 *N-N and b/h PIV3/RSV G1 could be achieved at all, the growth curves were repeated at a higher MOI of 0.1. At an MOI of 0.1, the peak titers of b/h PIV3/RSV F1*N-N and b/h PIV3/RSV G1 increased by 0.5 to 1.3 log₁₀ (data not shown). The lag phases of these viruses were reduced and peak titers were achieved earlier during the growth cycle.

### EXAMPLE 4

### Positional Effect Of eGFP Insertions in the Bovine Parainfluenza 3/Human Parainfluenza 3 Genome on Virus Replication

[0345] The effect of gene insertions into the bovine/human PIV3 vector backbone was assessed systematically by introducing the eGFP gene sequentially between all genes of PIV3 and observing the effect on virus replication and eGFP expression (FIG. 6). This type of assay investigates the importance of the transcriptional gradient observed for paramyxoviruses that yields specific ratios of viral mRNAs. Insertion of foreign genes will perturb these ratios and result in the synthesis of different amounts of viral proteins which may influence virus replication. The eGFP gene was chosen for this assay since it will not be incorporated into the virion membrane, and therefore should not interfere with viral processes such as packaging, budding, entry, etc. The eGFP gene was inserted into four positions of the b/h PIV3 genome, three of which were characterized for eGFP expression and virus replication. The eGFP gene cassette was linked to the bPIV3 N-P intergenic region. b/h GFP1 harbored the eGFP gene cassette in the 3′ most proximal position of the b/h PIV3 genome. b/h PIV3/GFP2 contained the eGFP gene cassette between the N and P genes of the b/h PIV3 genome. b/h PIV3/GFP3 was located between P and M, and b/h PIV3/GFP4 had the eGFP gene between M and F of b/h PIV3 (FIG. 6).

[0346] Construction of the eGFP gene cassette: the template of the eGFP gene is commercially available, e.g., it can be purchased from BD Biosciences (pIRES2-EGFP) or Clontech (pEGFP-N1). See Hoffmann et al., Virology 267:310-317 (2000). The eGFP gene was isolated by PCR and the bPIV3 N-P intergenic region was added by employing the overlapping PCR method, using the following oligos: 5′ATTCCTAGGATGGTGAGCAAGGGCG3′, 5′GGACGAGCTGTACAAGTAAAAAAATAGCACCTAATCATG3′, and 5′CTACCTAGGTGAATCTTTGGTTG3′. The eGFP cassette was inserted into pCR2.1, sequenced, and adherence to the rule-of-six was confirmed. Then the eGFP cassette was digested with AvrII, gel purified, and inserted into positions 1, 2, 3, and 4 of b/h PIV3 as described below.

[0347] Generation of full-length cDNAs harboring the eGFP gene in positions 1 and 2: the eGFP gene cassette was inserted into the 1-5 bPIV3 plasmids which contained bPIV3 sequences from nts 1-5200 and an AvrII restriction enzyme site either at nt 104 (position 1) or nt 1774 (position 2). After confirming proper orientation by restriction enzyme mapping, the plasmid harboring the eGFP gene in the first position was digested with SphI and BssHII and 4 kb (1-5 eGFP1) DNA fragments were isolated. Next, the rest of the b/h PIV3 genome was added as a SphI-BssHII 15.1 kb DNA fragment, yielding full-length cDNAs. For generation of full-length cDNA comprising the eGFP in position 2, the bPIV3 subclones harboring the eGFP genes in the second position were cut with SphI and NheI, and 5.8 kb (1-5 eGFP2) DNA fragments were isolated. Next, the rest of the b/h PIV3 genome was added as an NheI-SphI DNA fragment of 14 kb in size. The full-length chimeric b/h PIV3/eGFP plasmids were propagated in STBL-2 cells (Gibco/BRL) that provided high yields of full-length virus cDNA plasmids.

[0348] Generation of full-length cDNAs harboring the eGFP gene in positions 3 and 4: in order to insert the eGFP cassette into position 3 of the b/h PIV3 genome, an AvrII restriction enzyme site was introduced at nt 3730 in the P-M intergenic region of a subclone containing nts 1-5200 of bPIV3, altering two nucleotides. The following oligo and its complement were used in a QuickChange PCR reaction to introduce the AvrII site: 5′GGACTAATCAATCCTAGGAAACAATGAGCATCACC3′. The eGFP cassette was digested with AvrII and ligated into the AvrII linearized 1-5 bPIV3 subclone harboring the AvrII site at nt 3730. A 5.5 kb DNA fragment from SphI to NheI was isolated from the GFP containing subclone and introduced into the b/h PIV3 cDNA digested with SphI and NheI to produce a full-length plasmid. In order to add the eGFP gene cassette into position 4 of the b/h PIV3 genome, a subclone containing b/h PIV3 sequences from nts 1-8500 was generated. This subclone was linearized with NheI (nt 5042), and the eGFP cassette containing compatible AvrII ends was inserted. Then the subclone harboring the eGFP cassette was digested with SphI and XhoI and a 7.1 kb DNA fragment was isolated. The b/h PIV3 plasmid was treated with SphI and XhoI and a 11 kb fragment was produced. These two DNA fragments were ligated to generate b/h PIV3/GFP4.

[0349] The amount of eGFP produced by b/h PIV3/GFP1, 2, and 3 was assessed in two ways. First, the amount of green cells produced upon infecting Vero cells with b/h PIV3 GFP1, 2, and 3 at MOIs of 0.1 and 0.01 for 20 hours, was determined using a fluorescent microscope (FIG. 7A). b/h PIV3/GFP3 produced strikingly fewer green cells than b/h PIV3/GFP1 or 2.

[0350] Secondly, western analysis was performed on infected cells and the blots were probed with a GFP MAb as well as a PIV3 PAb. The initial observation that b/h PIV3/GFP3 produced dramatically less eGFP protein, was confirmed (FIG. 7B). b/h PIV3 GFP1 and GFP2 produced similar amounts of eGFP protein. The western blots methods controlled for same volume loading by probing with a PIV3 antibody (FIG. 7B). Interestingly, all three viruses showed similar amounts of PIV3 proteins (the HN protein is the most prominent band) produced. These results suggested that b/h PIV3/GFP3 transcribed less GFP mRNAs in position 3 as compared to positions 1 and 2. This data confirmed the presence of a transcriptional gradient of viral mRNAs in paramyxoviruses. The level of production of the PIV3 HN protein was not affected by the eGFP gene insertions (FIG. 7B).

[0351] In order to determine whether the GFP gene insertions had an effect on the kinetics of virus replication of b/h PIV3/GFP1, 2, and 3, multicycle growth curves in Vero cells were carried out (FIG. 7C). The growth curves showed that b/h PIV3/GFP1 had a delayed onset of virus replication at 24 and 48 hours post-infection than b/h PIV3/GFP2 or GFP3. However, the final peak titers obtained were similar for all three viruses. The kinetics of replication for b/h PIV3/GFP2 and GFP3 were nearly identical (FIG. 7C). Interestingly, the altered ratios of viral mRNAs did not appear to effect virus replication significantly.

### EXAMPLE 5

### Construction and Cloning of Chimeric Bovine Parainfluenza 3/Human Parainfluenza 3 Vectored Respiratory Syncytial Virus F with Different Intergenic Regions

[0352] Three different constructs were used to determine the effect of intergenic region (nucleotides between each mRNA, e.g., nucleotides between the F gene and the N gene) on protein expression and viral replication. See FIG. 8. The first construct was b/h PIV3 vectored RSV F1* N-N in position 1, which had a shorter bPIV N gene stop/N gene start sequence (RSV F1* N-N in FIG. 4); the second construct was b/h PIV3 vectored RSV F at position 1 (RSV F2 in FIG. 4); and the last one was b/h PIV3 vectored RSV at position 1 (RSV F1 in FIG. 4). All three constructs were generated according to the cloning strategies described in section 7, Example 2.

[0353] The most dramatic difference between the two cassettes is the distance between the N gene start sequence and the N translation start codon in b/h PIV3/RSV F1*N-N which was only 10 nts long. In contrast, this distance is 86 nts long in b/h PIV3/RSV F2. The other difference is the use of the N gene start sequence in b/h PIV3/RSV F1*N-N rather than the P gene start sequence as was done in b/h PIV3/RSV F2. In order to determine whether the distance between the transcription gene start and the translation start of a viral transcription unit has an effect on virus replication, the b/h PIV3/RSV F1 construct was generated that contained the identical RSV F gene cassette as was used for b/h PIV3/RSV F2.

### EXAMPLE 6

### The Length and/or Nature of the Intergenic Region Downstream of the Respiratory Syncytial Virus Gene has an Effect on Virus Replication

[0354] The three constructs in Example 5 were used in the following experiments to determine the effects of the intergenic region on viral protein expression and viral replication. See FIG. 9.

[0355] First, RSV F protein expression for b/h PIV3/RSV F1, b/h PIV3/RSV F1*N-N, and b/h PIV3/RSV F2 was compared at 24 and 48 hrs post-infection at an MOI of 0.1 in Vero cells using Western blots. Western blots were performed as follows: Chimeric viruses were used to infect (70-80%) subconfluent Vero cells at a MOI of 0.1. Twenty-four hours and forty-eight hours post infection the media overlay was removed and infected monolayers were washed once with 1 ml of PBS. The cells were subsequently lysed in 400 ml of Laemmli buffer (Bio-Rad) containing 0.05% b-Mercaptoethanol (Sigma). 15 ml of each sample was separated on 12% Tris-HCl Ready Gel (Bio-Rad) and transferred to nylon membranes using a semi-dry transfer cell (Bio-Rad). Nylon membranes were rinsed in PBS (pH 7.6) containing 0.5% (v/v) Tween-20 (Sigma) (PBST) and blocked with PBST containing 5% (w/v) dry milk (PBST-M) for 20-30 minutes at room temperature. Membranes were incubated with either a mixture of RSV F monoclonal antibodies (WHO 1269, 1200, 1153, 1112, 1243, 1107) at a 1:1000 dilution in PBST-M in PBST-M for 1 hour at room temperature. Following 4 washes with PBST, the membranes were incubated with a secondary horseradish peroxidase-conjugated goat anti-mouse antibody (Dako) at a 1:2000 dilution in PBST-M for 1 hour at room temperature. Membranes were washed 4 times with PBST and developed using a chemiluminescence substrate (Amersham Pharmacia) and exposed to Biomax Light Film (Kodak) for visualization of protein bands.

[0356] b/h PIV3/RSV F1 expressed RSV F₁ protein levels at 24 and 48 hrs post-infection close to the levels observed for b/h PIV3/RSV F2 but much higher than those of b/h PIV3/RSV F1*N-N. Therefore, the spacing between the gene start element and the translation start codon may be critical for virus replication. The N gene start sequences were changed to P gene start sequences, however this change only incurred the alteration of a single nucleotide. Either of these factors may be responsible for rescuing the RSV F protein expression phenotype.

[0357] Next, multicycle growth curves were carried out to compare the kinetics of virus replication of b/h PIV3/RSV F1, b/h PIV3/RSV F1*N-N, and b/h PIV3/RSV F2 in Vero cells at an MOI of 0.1 (see FIG. 9B), which was performed as follows: Vero cells were grown to 90% confluence and infected at an MOI of 0.1 with b/h PIV3, b/h PIV3/RSV F1*N-N, b/h PIV3/RSV F1, and b/h PIV3/RSV F2. The infected monolayers were incubated at 37° C. At 0, 24, 48, 72, and 96 hours post-infection, cells and media were harvested together and stored at −70° C. Virus titers for each time point harvest were determined by plaque assays in Vero cells. The plaque assays were immunostained with RSV polyclonal antisera for quantification after 5 days of incubation.

[0358] As was shown on FIG. 9B, the onset of replication of b/h PIV3/RSV F1*N-N was delayed and peak titers were lower than those of b/h PIV3/RSV F2. In contrast, b/h PIV3/RSV F1 displayed a growth curve that was nearly identical to that observed for b/h PIV3/RSV F2.

### EXAMPLE 7

### Cloning of Trivalent Bovine Parainfluenza 3/Human Parainfluenza 3 Vectored Constructs

[0359] The following examples relate to the generation of trivalent vaccines that harbor the surface glycoproteins (F and HN) of hPIV3, RSV F, and hMPV F to protect children from disease caused by RSV, hMPV and hPIV3 using a single live attenuated virus vaccine. These trivalent viruses were recovered by reverse genetics.

[0360] The construction of two virus genomes, each comprising a chimeric b/h PIV3 backbone with two additional heterologous sequence insertions, wherein one heterologous nucleotide sequence is derived from a metapneumovirus F gene and another heterologous nucleotide sequence is derived from a respiratory syncytial virus F gene, were done as follows (see FIG. 10): plasmids b/h PIV3/RSV F2 or b/h PIV3/hMPV F2 was digested with SphI and NheI, and a 6.5 kb fragment was isolated. The full-length cDNA for b/h PIV3 RSV F1 or b/h PIV3/hMPV F1 was digested with SphI and NheI and a 14.8 kb DNA fragment was isolated and ligated with the 6.5 kb DNA fragment derived from plasmid b/h PIV3/RSV F2 or b/h PIV3/hMPV F2 to generate full-length viral cDNAs.

[0361] Virus with the above described constructs has been amplified in Vero cells. The engineered virus as described herein can be used as a trivalent vaccine against the parainfluenza virus infection, metapneumovirus infection, and the respiratory syncytial virus infection.

### EXAMPLE 8

### Cloning of Two Respiratory Syncytial Virus F to the Bovine Parainfluenza 3/Human Parainfluenza 3 Vector

[0362] Chimeric viruses that carry two copies of the RSV F gene were designed in order to determine whether more RSV protein produced by the chimeric virus will result in an improved immunogenicity. This virus was rescued by reverse genetics, biologically cloned and amplified in Vero cells to yield a virus stock with a titer of 1×10⁶ pfu/ml. This virus, b/h PIV3/RSV F1F2, can be used to assess for virus growth kinetics, for RSV F protein production, and for replication and immunogenicity in hamsters.

[0363] The constructs were generated in the following manner (see FIG. 11): the 1-5 RSV F2 plasmid was digested with SphI and NheI, and a 6.5 kb fragment was isolated. The full-length cDNA for b/h PIV3 RSV F1 was digested with SphI and NheI and a 14.8 kb DNA fragment was isolated and ligated with the 6.5 kb DNA fragment derived from 1-5 bPIV3/RSV F2 to generate full-length viral cDNAs.

### EXAMPLE 9

### Construction and Cloning of Bovine Parainfluenza 3/Human Parainfluenza 3 Vectored Human Metapneumovirus F cDNA

[0364] The F gene of human metapneumovirus (hMPV) was inserted in positions 1 and 2 of the b/h PIV3 genome (FIG. 12). The hMPV F gene cassette harbored the bPIV3 N-P intergenic region. The hMPV F gene plasmid (pRF515) was used, and a single nucleotide mutation in the hMPV F gene was corrected (i.e., nucleotide 3352 was corrected from C to T (wild type)), generating pRF515-M4. The bPIV3 N-P intergenic region was added at the 3′ end of the hMPV F gene using overlapping PCR. For hMPV F, the overlapping PCR oligo was 5′GGCTTCATACCACATAATTAGAAAAATAGCA CCTAATCATGTTCTTACAATGGTCGACC 3′. During this cloning step, oligos were used at the 5′ end (5′ GCAGCCTAGGCCGCAATAACAATGTCTTGGAAAGTGGTG ATC 3′) and at the 3′ end of the hMPV F gene cassette (5′ CTACCTAGGTGAATCTT TGGT TG 3′) in the PCR reaction that contained AvrII restriction enzyme sites. The hMPV F gene cassette was adjusted to conform to the rule of six using QuickChange mutagenesis kit and the following oligos (5′CCTAGGCCGCAATAGACAATGT CTTGG 3′, 5′CCAAGACATT GTCTATTGCGGCCTAGG 3′). Full-length b/h PIV3/hMPV F1 (position 1) and F2 (position 2) cDNA plasmids were generated in the same fashion as described in section 9, Example 4, supra, for b/h PIV3/eGFP1 and eGFP2.

### EXAMPLE 10

### Immunoprecipitation and Replication Assays of Bovine Parainfluenza 3/Human Parainfluenza 3 Vectored Human Metapneumovirus F

[0365] To confirm that the F protein was expressed in the b/h PIV3 vectored human metapneumovirus F at position 2 (hMPV F2), guinea pig or human antiserum were used to immunoprecipitate the hMPV F protein (see FIG. 13A). For immunoprecipitation of the hMPV F protein expressed by b/h PIV3, Vero cells were infected with b/h PIV3 or b/h PIV3/hMPV F2 at an MOI of 0.1 or 0.05. Twenty-four hours post-infection, the cells were washed once with DME without cysteine and minus methionine (ICN) and incubated in the same media for 30 min. The media was removed and 0.5 ml DME lacking cysteine and methionine containing 100 μCi of [³⁵S]-Pro-Mix (Amersham) was added to the cells. The infected cells were incubated in the presence of ³⁵S-isotopes for 5 hours at 37° C. Media was removed and the infected cells were lysed in 0.3 M RIPA buffer containing protease inhibitors. The cell lysate was incubated with hMPV guinea pig or human polyclonal antisera and bound to IgG-agarose (Sigma). After washing three times with 0.5 M RIPA buffer, the samples were fractionated on a 10% protein gel. The gel was dried and exposed to X-ray film.

[0366] The expression of hMPV F protein by b/h PIV3/hMPV F2 was shown by immunoprecipitation using the gp and human anti-hMPV antisera (FIG. 13A). Interestingly, a specific band migrating at approximately 80 kDa was observed in the lysates of b/h PIV3/hMPV F2. This size corresponded to the F precursor protein, F₀. Non-specific bands of different sizes were also observed in the b/h PIV3 and mock control lanes (FIG. 13). This data suggested that the b/h PIV3/hMPV F2 expressed the hMPV F protein. However, the hMPV antibody reagents available are limited and these antisera interact only with the precursor of the hMPV F protein. It could also be possible that the cleaved F1 is unstable and thus not easily visualized using this method.

[0367] Growth curves were performed to determine the kinetics of virus replication of b/h PIV3/hMPV F2 and compare them to those observed for b/h PIV3 and b/h PIV3/RSV F2 in Vero cells at an MOI of 0.1 (FIG. 13B). The data showed that b/h PIV3/hMPV F2 displayed a delayed onset of replication at 24 hours post-infection compared to b/h PIV3/RSV F2. However, at 48 hours post-infection and beyond, a difference in replication was no longer observed.

[0368] Growth curves were also performed to determine the kinetics of viral replication of b/h PIV3/hMPV F1 and compare them to those observed for b/h PIV3/hMPV F2 and b/h PIV3 in Vero cells at an MOI of 0.01 (FIG. 13C). The data showed that b/h PIV/hMPV F1 had a delayed onset of replication and yields lower peak titers compared to b/h PIV3/hMPV F2 or b/h PIV3. The plaque size of b/h hMPV F1 is also smaller compared to b/h hMPV F2.

[0369] The chimeric viruses, b/h PIV3/hMPV F1 and F2 were also assessed for their ability to infect and replicate in Syrian Golden hamsters (Table 5). The results showed that b/h PIV3/hMPV F1 and F2 replicated in the nasal turbinates and lungs of hamsters to levels observed for b/h PIV3. Even hMPV replicated to titers of 5.3 and 3.6 log₁₀ TCID₅₀/g tissue in the upper and lower respiratory tracts of hamsters. These data showed that b/h PIV3/hMPV F1 and F2 could efficiently infect and replicate in the respiratory tract of hamsters, demonstrating thereby that hamsters represent a suitable small animal model to determine immunogenicity of hMPV as well as utilize this animal model to evaluate hMPV vaccine candidates.

TABLE 5
Replication of b/h PIV3 Expressing
the hMPV F Protein in Positions 1 or 2 in Hamsters

Mean virus titer on day 4 post-infection
(log₁₀TCID₅₀/g tissue ± S.E.)^{b}

| Virus^{a} | Nasal turbinates | Lungs |
|---|---|---|
| b/h PIV3 | 4.8 ± 0.2 | 5.6 ± 0.6 |
| b/h hMPV F1 | 5.3 ± 0.5 | 5.7 ± 0.4 |
| b/h hMPV F2 | 5.7 ± 0.5 | 4.6 ± 0.3 |
| hMPV | 5.3 ± 0.1 | 3.6 ± 0.3 |

^{a}Groups of six hamster were inoculated intranasally with 1 × 10⁶ pfu of indicated virus.
^{b}Standard error
Note:
TCID₅₀ assays were read for CPE on Day 10.

### EXAMPLE 11

### Cloning of the Soluble Respiratory Syncytial Virus F Gene Construct

[0370] A construct containing a single copy of the soluble RSV F gene, a version of the RSV F gene lacking the transmembrane and cytosolic domains, was also generated (FIG. 14). This construct can be used to test for immunogenicity. Its advantage would be-the inability of the soluble RSV F to be incorporated into the virion membrane. Therefore this virus may be viewed as a safer chimeric virus since its virus tropism is not expected to change. The cDNA plasmid for b/h PIV3/sol RSV F can be rescued by reverse genetics.

[0371] The plasmid 1-5/RSV F2 (described previously) was used as a DNA template for PCR. The oligo RSV f.2 (5′GCTGTAACAGAATTGCAGTTGC 3′) (which anneals at nt 5946 of RSV) and the oligo 5′CGTGGTCGACCATTGTAAGAACATGATTAGGTGCTATTTTTATTTAATTTGTGGTGGATTTACCGGC3′ were employed to remove the transmembrane and cytoplasmic domains of RSV F, deleting 150 nucleotides. The resulting PCR fragment was digested with HpaI and SalI and introduced into 1-5 RSV F2 treated with HpaI and SalI to yield 1-5 bPIV3/sol RSV F. This plasmid was digested with SphI and NheI and the resulting fragment was introduced into a b/h PIV3 cDNA digested with SphI and NheI to generate a full-length cDNA.

### EXAMPLE 12

### Expression of Human Metapneumovirus F in Cells Infected with Bovine Parainfluenza 3/Human Parainfluenza 3 Vectored Human Metapneumovirus F

[0372] The b/h 104 hMPV F virus stocks were serially diluted 10 fold and used to infect subconfluent Vero cells. Infected cells were overlayed with optiMEM media containing gentamycin and incubated at 35° C. for 5 days. Cells were fixed with 100% methanol and immunostained with 1:1000 dilution of anti-hMPV001 guinea pig sera followed by 1:1000 dilution of anti-guinea pig HRP conjugated antibodies. Expression of hMPV F is visualized by specific color development in the presence of the AEC substrate system (DAKO corporation). See FIG. 15A.

[0373] The b/h NP-P hMPV F virus stocks were serially diluted 10 fold and used to infect subconfluent Vero cells. Infected cells were overlayed with 1% methyl cellulose in EMEM/L-15 medium (JRH Biosciences; Lenexa, Kans.) supplemented with 1×L15/MEM media containing penicillin/streptomycin, L-glutamine and fetal bovine serum. Infected cells were incubated at 35° C. for 5 days, fixed with 100% methanol and immunostained with 1:1000 dilution of anti-hMPV001 guinea pig sera followed by 1:1000 dilution of anti-guinea pig HRP conjugated antibodies. (See FIG. 15B). The anti HMPV001 guinea pig serum is specific for HMPV001 proteins and do not bind to b/h PIV3 proteins.

### EXAMPLE 13

### Rescue of Chimeric Bovine Parainfluenza Type 3/Human Parainfluenza Type 3 Virus 1N HeLa Cells and Vero Cells

[0374] Rescue of the chimeric b/h PIV3 virus was done using a similar procedure as for bPIV3 rescue. Rescue of b/h PIV3 chimeric virus by reverse genetics was carried out in HeLa cells using LipofecTACE (Gibco/BRL). The 80% confluent HeLa cells, Hep-2 cells, or Vero cells were infected with MVA at an MOI of 4. One hour post-infection, the full-length anti-genomic b/h PIV3 cDNA (4 μg) was transfected into the infected HeLa or Vero cells together with the NP (0.4 μg), P (0.4 μg), and L/pCITE (0.2 μg) expression plasmids. Forty hours post-transfection, the cells and the cell supernatant were harvested (P0) and subjected to a single freeze-thaw cycle. The resulting cell lysate was then used to infect a fresh Vero cell monolayer in the presence of 1-beta-D-arabinofuranosylcytosine (ara C), a replication inhibitor of vaccinia virus, to generate a P1 virus stock. The supernatant and cells from these plates were harvested, freeze-thawed once and the presence of bPIV3 virus particles was assayed for by immunostaining of virus plaques using PIV3-specific antiserum. The cell lysates of the P1 harvest resulted in complete CPE of the Vero cell monolayers and immunostaining indicated the presence of an extensive virus infection.

### EXAMPLE 14

### Rescue of Bovine Parainfluenza Type 3/Human Parainfluenza Type 3 Vectored Human Metapneumovirus F Viruses

[0375] The b/h PIV3 viruses expressing hMPV F at position one (b/h 104 hMPV F) or position two (b/h NP-P hMPV F) were obtained as follows. HEp-2 or Vero cells at 80-90% confluency in 6 well dishes were infected with Fowlpox-T7 at a multiplicity of infection (m.o.i) of 0.1 to 0.3. Following infection with Fowlpox-T7, cells were washed once with PBS and transfected with the following amounts of plasmid DNA: full length b/h 104 hMPV F or b/h NP-P hMPV F cDNA 2.0 μg, pCite N 0.4 μg, pCite P 0.4 μg, pCite L 0.2 μg. (The pCite plasmids have a T7 promoter followed by the IRES element derived from the encephalomyocarditis virus (EMCV)). Transfection was performed in the presence of Lipofectamine 2000 (Invitrogen) according to manufacturer's instruction. The transfection reaction was incubated at 33° C. for 5 to 12 hours following which the media containing lipofectamine 2000 was replaced with 2 ml of fresh OptiMEM containing gentamicin. The transfected cells were further incubated at 33° C. for two days. Cells were stabilized with SPG and lyzed by one freeze-thaw cycle at −80° C. The crude cell lysate was used to infect a new Vero monolayer in order to amplify rescued viruses.

### EXAMPLE 15

### Rescue of Bovine Parainfluenza Type 3/Human Parainfluenza Type 3 Vectored Respiratory Syncytial Virus Genes by Reverse Genetics

[0376] Infectious virus was recovered by reverse genetics in HeLa or HEp-2 cells using transfection methods described previously (see Example 13). Briefly, HEp-2 or Vero cells at 80-90% confluency in 6 well tissue culture dishes were infected with FP-T7 or MVA-T7 at a multiplicity of infection (m.o.i.) of 0.1-0.3 or 1-5 respectively. Following infection with FP-T7 or MVA-T7, cells were washed once with PBS and transfected with the following amounts of plasmid DNA (2.0 μg full-length b/h PIV3 RSV F or G cDNA, 0.4 μg pCITE/N, 0.4 μg pCITE/P, 0.2 μg pCITE/L). Transfections were performed in the presence of Lipofectamine2000 (Invitrogen) according to manufacturer's instruction. The transfection reactions were incubated at 33° C. for 5 to 12 hours following which the media containing Lipofectamine 2000 was replaced with 2 ml of fresh OptiMEM containing gentamicin. The transfected cells were incubated further at 33° C. for two days. Cells were stabilized with SPG and lysed with one freeze-thaw cycle at −80° C. The crude cell lysate was used to infect a new Vero cell monolayer in order to amplify rescued viruses. The chimeric viruses were purified by limiting dilutions in Vero cells and high titer virus stocks of 10⁶-10⁸ PFU/ml were generated. The RSV genes of the chimeric viruses were isolated by RT-PCR and the sequences were confirmed. Expression of the RSV proteins was confirmed by immunostaining of infected Vero cell monolayers with RSV goat polyclonal antiserum (Biogenesis).

### EXAMPLE 16

### Confirmation of Chimeric Bovine Parainfluenza Type 3/Human Parainfluenza Type 3 Virus Rescue by RT-PCR

[0377] To ascertain that the rescued virus is chimeric in nature, i.e. the virus contains hPIV3 F and HN gene sequences in a bPIV3 backbone, the viral RNA genome was analyzed further by RT-PCR. Vero cells, infected with the P1 virus stock of three independently derived isolates of b/h PIV3 were harvested and total RNA was isolated. The viral RNA was amplified using an oligo that anneals at position 4757 of bPIV3. A viral region from nt 5255 to 6255 was amplified by PCR. The resulting 1 kb PCR fragment should contain hPIV3 sequences. This was confirmed by digestion with enzymes (SacI and Bgl II) specific for hPIV3 and that do not cut in the complementary region of bPIV3 (see FIG. 2). As expected, SacI and Bgl II cut the PCR fragment into smaller fragments confirming that the isolated sequences are derived from hPIV3 (see lanes 3, 5, 7). In addition, a region in the polymerase L gene from nt 9075 to nt 10469 was amplified by PCR. This region should contain bPIV3 sequences. Again the resulting 1.4 kb PCR fragment was digested using enzyme specific for bPIV3 (PvuII and BamHI) that do not cut in the equivalent region of hPIV3 (FIG. 3). The 1.4 kb fragment was indeed digested by both PvuII and BamHI confirming that the polymerase gene is bPIV3 in origin (see lanes 3, 4, 6, 7, 9 and 10 of FIG. 3). In summary, the RT-PCR analysis shows that the rescued b/h PIV3 virus is chimeric in nature. It contains hPIV3 F and HN genes in a bPIV3 genetic backbone.

### EXAMPLE 17

### Genetic Stability of Bovine Parainfluenza Type 3/Human Parainfluenza Type 3 Vectored Respiratory Syncytial Virus Genes

[0378] In order to demonstrate that the b/h PIV3/RSV chimeric viruses are genetically stable and maintain the introduced RSV gene cassettes, infected cell lysates were serially blind passaged ten times in Vero cells. Sub-confluent Vero cells in T25 flasks were infected with b/h PIV3/RSV at an MOI of 0.1 and incubated for 4 days at 33° C. or until CPE was visible. At the end of the incubation period the infected cells and media were harvested, frozen and thawed two times, and the resulting cell lysate was used to infect a new T25 flask of Vero cells. This cycle was repeated ten times. All cell lysates from P1 to P10 were analyzed by plaque assay and immunostaining with RSV polyclonal antisera for expression of RSV proteins and virus titers. At passage 10, the RSV gene cassettes were isolated by RT-PCR and the RSV gene sequences were verified by DNA sequence analysis (to identify possible nucleotide alterations). All of the isolates maintained the RSV gene cassettes and RSV protein expression for the 10 passages analyzed (data not shown).

### EXAMPLE 18

### Virion Fractionation of Bovine Parainfluenza Type 3/Human Parainfluenza Type 3 Vectored Respiratory Syncytial Virus Genes on Sucrose Gradients

[0379] The question of whether the RSV proteins were incorporated into the b/h PIV3 virion was investigated further by use of a biochemical assay. Vero cells were inoculated with each of the chimeric b/h PIV3/RSV viruses at an MOI of 0.1. When maximum CPE was visible, the infected monolayers were frozen, thawed, and spun for 10 minutes at 2000 rpm. The clarified supernatants were spun through a 20% sucrose cushion at 100,000×g for 90 minutes. The pellet was then resuspended in PBS and layered gently on top of a 20-66% sucrose gradient. The gradients were spun at 100,000×g for 20 hours to achieve equilibrium. Eighteen 2 ml fractions were harvested starting from the top of the gradient. 0.4 ml of each fraction was removed for virus titer determination. Each fraction was resuspended in 2 volumes of 20% PBS and concentrated by spinning at 100,000×g for 1 hour. The pellet was then resuspended in 0.05 ml Laemmli buffer (Biorad) and analyzed for RSV and PIV3 proteins by Western blot, using an RSV F MAb (NuMax L1FR-S28R), RSV (Biogenesis) and bPIV3 (VMRD) polyclonal antisera. C-terminally truncated RSV F protein expressed in baculovirus that was purified to homogeneity, was also analyzed on a sucrose gradients.

[0380] The fractions were also analyzed for peak virus titers by plaque assay. Control gradients of free RSV F (generated in baculovirus and C-terminally truncated), RSV A2, and b/h PIV3 were carried out initially. The majority of free RSV F was present in fractions 3, 4, 5, and 6 in the top portion of the gradient (FIG. 16A). The biggest concentration of RSV virions was observed in fractions 10, 11 and 12 (FIG. 16B). The RSV fractions were probed with RSV polyclonal antiserum as well as with RSV F MAb. The fractions that contained the greatest amounts of RSV virions also showed the strongest signal for RSV F, suggesting that the RSV F protein co-migrated and associated with RSV virions (FIG. 16B). These fractions also displayed the highest virus titers (FIG. 16B). The b/h PIV3 virions may be more pleiomorphic and thus the spread of the peak fractions containing b/h PIV3 virions was more broad. b/h PIV3 virions were present in fractions 9, 10, 11, 12, and 13 (FIG. 16C). Again the fractions harboring the most amounts of virions, also displayed the highest virus titers by plaque assay (FIG. 16C). Sucrose gradient fractions of b/h PIV3/RSV F2 were analyzed with both a PIV3 polyclonal antiserum and an RSV F MAb (FIG. 16D). The fractions containing most of the virions were fractions 11, 12, 13, and 14 as was shown by western using the PIV3 antiserum. Correspondingly, these were also the fractions that displayed the highest amounts of RSV F protein. However, some free RSV F was also present in fractions 5 and 6. Fractions 11, 12, 13 and 14 displayed the peak virus titers (FIG. 16D). Similarly, the fractions containing the most virions of b/h PIV3/RSV G2 (fractions 9, 10, 11, and 12) also showed the strongest signal for RSV G protein (FIG. 16E). Again these were the fractions with the highest virus titers (FIG. 16E). Collectively these data suggested that the majority of the RSV F and G proteins co-migrated and associated with the b/h PIV3 virions. However, some free RSV proteins were also present in the top fractions of the gradients.

### EXAMPLE 19

### The Chimeric Bovine Parainfluenza Type 3/Human Parainfluenza Type 3 Vectored Respiratory Syncytial Virus (RSV) Could not be Neutralized with RSV Antisera

[0381] In order to address the important safety question of whether the RSV surface glycoproteins incorporated into the b/h PIV3 virion resulted in an altered virus tropism phenotype, neutralization assays were carried out (Tables 6 and 7). RSV F MAbs (WHO 1200 MAb) neutralized 50% of wildtype RSV A2 at a 1:2000 dilution (Table 6). In contrast, even a dilution of 1:25 did not neutralize any of the chimeric b/h PIV3/RSV. Similarly, a dilution of 1:400 of the polyclonal RSV antiserum (Biogenesis) neutralized 50% of RSV A2, but even a dilution of 1:15.6 did not neutralize b/hPIV3 RSV (Table 6).

TABLE 6
The b/h PIV3 RSV Chimeric Viruses are not
Neutralized by RSV Antibodies

| Virus used in | Reciprocal 50% neutralizing antibody dilution | |
|---|---|---|
| neutralization assay | RSV F MAb | RSV Ab |
| RSV | 2000 | 400.0 |
| b/h PIV3 | <25 | <15.6 |
| b/h RSV F1*N-N | <25 | <15.6 |
| b/h RSV F2 | <25 | <15.6 |
| b/h RSV G1 | ND | <15.6 |
| b/h RSV G2 | ND | <15.6 |

[0382] hPIV3 F MAb C191/9 neutralized 50% of b/h PIV3 as well as the b/h PIV3/RSV at a dilution of 1:500 (Table 7). An hPIV3 HN MAb 68/2 neutralized b/h PIV3 at a dilution of 1:16,000, and the b/h PIV3/RSV at a dilution of 1:32,000 (Table 7).

TABLE 7
The b/h PIV3 RSV Chimeric Viruses are
Neutralized by hPIV3 Mabs

| Virus used in | Reciprocal 50% neutralizing antibody dilution | |
|---|---|---|
| neutralization assay | hPIV3 F MAb | hPIV3 HN MAb |
| RSV | 62.5 | <500 |
| b/h PIV3 | 500 | 16000 |
| b/h RSV F1*N-N | 500 | 32000 |
| b/h RSV F2 | 500 | 32000 |
| b/h RSV G1 | ND^{d} | 32000 |
| b/h RSV G2 | ND | 32000 |

^{d}not determined.

### EXAMPLE 20

### The Chimeric Bovine PIV Demonstrate Attenuated Phenotypes and Elicit Strong Protective Responses when Administered In Vivo

[0383] Five week old Syrian Golden hamsters were infected with 5×10⁵ pfu of wildtype bPIV3, recombinant bPIV3, hPIV3, human/bovine PIV3, and placebo. The five different animal groups were kept separate in micro-isolator cages. Four days post-infection, the animals were sacrificed. The nasal turbinates and lungs of the animals were homogenized and stored at −80° C. Virus present in the tissues was determined by TCID₅₀ assays in MDBK cells at 37° C. Virus infection was confirmed by hemabsorption with guinea pig red blood cells. Table 8 shows the replication titers of the different PIV3 strains in hamsters in the lungs and nasal turbinates. Note that recombinant bPIV3 and the b/h PIV3 chimeric viruses are attenuated in the lungs of the hamsters:

TABLE 8
Replication of PIV3 Viruses in Syrian
Golden Hamsters in the Nasal Turbinates and Lungs.
Replication of bPIV3, r-bPIV3, r-bPIV3(l), hPIV3 and Bovine/Human
PIV3(l) in the Upper and Lower Respiratory Tract of Hamsters

Mean virus titer on day 4 postinfection
(log₁₀ TCID₅₀/g tissue = S.E.)^{b}

| Virus^{a} | Nasal turbinates | Lungs |
|---|---|---|
| bPIV3 | 5.3 ± 0.3 | 5.3 ± 0.2 |
| r-bPIV3 | 5.0 ± 0.3 | 3.5 ± 0.2 |
| r-bPIV3(l) | 5.5 ± 0.2 | 5.4 ± 0.2 |
| hPIV3 | 4.9 ± 0.2 | 5.4 ± 0.2 |
| Bovine/human PIV3(l) | 4.9 ± 0.2 | 4.5 ± 0.2 |

^{a}Groups of four hamsters were inoculated intranasally with 5 × 10⁵ PFU of indicated virus.
^{b}Standard error.

[0384] Furthermore, serum samples collected from the hamsters prior to infection and at day 21 post-infection were analyzed in a hemagglutination inhibition assay. The serum samples were treated with receptor destroying enzyme (RDE, DENKA Seiken Co.) and non-specific agglutinins were removed by incubation with guinea pig red blood cells for 1 hour on ice. Wildtype bPIV3 and hPIV3 were added to two-fold serially diluted hamster serum samples. Finally, guinea pig red blood cells (0.5%) were added, and hemagglutination was allowed to occur at room temperature. Table 9 shows the antibody response generated in the hamsters upon being infected with the different PIV3 strains. Note that the b/h PIV3 chimeric virus generates as strong an antibody response against hPIV3 as does wild type hPIV3, far exceeding the response generated by the recombinant or wildtype bPIV3:

TABLE 9
Hemaglutination Inhibition Assay Using Serum from
Hamsters Infected with Different PIV3 Viruses.

| | |
|---|---|
| Virus Used for Inoculation | Hamster Serum Titers for |

| of the Hamsters | wt bPIV3 | HPIV3 |
|---|---|---|
| Recombinant bPIV3 | 1:16 | 1:16 |
| Wt bPIV3 | 1:16 | 1:8 |
| Wt hPIV3 | 1:4 | 1:128 |
| b/h PIV3 chimeric virus | 1:8 | 1:128 |
| Placebo | <1:4 | <1.4 |

[0385] These results demonstrate the properties of b/h PIV3 chimeric viruses of the present invention which make these recombinants suitable for use in vaccine formulations. Not only do the b/h PIV3 chimeric viruses demonstrate an attenuated phenotype when administered in vivo, but they also generate as strong an antibody response as the wildtype hPIV3. Thus, because the chimeric viruses of the present invention have a unique combination of having an attenuated phenotype and eliciting as strong an immune response as a wildtype hPIV, these chimeric viruses have the characteristics necessary for successful use in humans to inhibit and/or protect against infection with PIV.

### EXAMPLE 21

### Replication of Bovine Parainfluenza 3/Human Parainfluenza 3 Vectored Respiratory Syncytial Virus G or F Protein in the Upper and Lower Respiratory Tract of Hamsters

[0386] Five week old Syrian Golden hamsters (six animals per group) were infected intranasally with 1×10⁶ pfu or 1×10⁴ PFU of b/h PIV3, b/h PIV3/RSV, RSV A2, or placebo medium in a 100 ml volume. The different groups were maintained separately in micro-isolator cages. Four days post-infection, the nasal turbinates and lungs of the animals were harvested, homogenized and stored at −70° C. The titers of virus present in the tissues were determined by TCID₅₀ assays in Vero cells. For the challenge assays, the animals were inoculated on day 28 intranasally with 1×10⁶ pfu/ml of hPIV3 or RSV A2. Four days post-challenge, the nasal turbinates and lungs of the animals were isolated and assayed for challenge virus replication by plaque assays on Vero cells that were immunostained for quantification. Table 10 shows the replication titers of the different strains in hamsters in the lungs and nasal turbinates.

TABLE 10
Replication of bovine/human PIV3 Expressing the RSV G or F
proteins in the Upper and Lower Respiratory Tract of Hamsters.

Mean virus titer on day 4 postinfection
(log₁₀ TCID₅₀/g tissue = S.E.)^{b}

| Virus^{a} | Nasal turbinates | Lungs |
|---|---|---|
| b/h PIV3 | 4.8 ± 0.4 | 4.4 ± 0.3 |
| RSV A2 | 3.4 ± 0.5 | 3.3 ± 0.5 |
| b/h RSV G1 | 4.2 ± 0.7 | 2.9 ± 0.7 |
| b/h RSV F1 | 3.9 ± 0.4 | 2.7 ± 0.2 |
| b/h RSV F1 N-P | 4.6 ± 0.4 | 3.5 ± 0.2 |
| b/h RSV G2 | 4.2 ± 0.9 | 4.3 ± 0.2 |
| b/h RSV F2 | 4.6 ± 0.6 | 4.4 ± 0.5 |

^{a}Groups of four hamsters were inoculated intranaselly with 5 × 10⁶ PFU of indicated virus.
^{b}Standard error.

[0387] Syrian Golden hamsters represent a suitable small animal model to evaluate replication and immunogenicity of recombinant bPIV3 and hPIV3 genetically engineered viruses. It was expected that the introduction of the RSV antigens would not alter the ability of the chimeric b/h PIV3 to replicate in hamsters. The results showed that all of the chimeric viruses replicated to levels similar to those of b/h PIV3 in the nasal turbinates of hamsters (Table 10). In contrast, the chimeric viruses harboring the RSV genes in the first position displayed 1-1.5 log₁₀ reduced titers in the lungs of hamsters compared to b/h PIV3 (Table 10). The chimeric viruses containing the RSV genes in the second position replicated to similar titers observed for b/h PIV3 in the lower respiratory tract of hamsters (Table 10).

### EXAMPLE 22

### Bovine Parainfluenza 3/Human Parainfluenza 3 Vectored Respiratory Syncytial Virus Immunized Hamsters were Protected upon Challenge with Human Parainfluenza 3 and Respiratory Syncytial Virus A2

[0388] On Day 28 post-immunization, the hamsters were challenged with 1×10⁶ PFU of either RSV A2 or hPIV3 to evaluate the immunogenicity induced by the b/h PIV3/RSV. Animals that received the b/h PIV3/RSV were protected completely from RSV as well as hPIV3 (Table 11). Only the animals that were administered the placebo medium displayed high titers of challenge virus in the lower and upper respiratory tracts. This assay also showed that animals immunized with RSV, were not protected from challenge with hPIV3. Similarly, animals vaccinated with hPIV3 displayed high titers of the RSV challenge virus (Table 11).

TABLE 11
b/h PIV3/RSV Immunized Hamsters were
Protected Upon Challenge with hPIV3 and RSV A2

| | hPIV3 | | RSV A2 | |
|---|---|---|---|---|
| | Mean Virus Titer on Day 4 | | Mean Virus Titer on Day 4 | |
| | Post-challenge | | Post-challenge | |
| Challenge | (log₁₀TCID₅₀/g | | (log₁₀ pfu/g | |
| Virus: | tissue ± S.E.)^{b,c} | | tissue ±S.E.)^{b} | |
| Immunizing | Nasal | | Nasal | |
| Virus^{a} | turbinates | Lungs | Turbinates | Lungs |
| b/h PIV3 | <1.2 ± 0.0 | <1.0 ± 0.1 | ND | ND |
| b/h RSV G1 | <1.2 ± 0.1 | <1.1 ± 0.1 | <1.0 ± 0.3 | <0.7 ± 0.1 |
| b/h RSV F1 | <1.2 ± 0.2 | <1.0 ± 0.0 | <1.1 ± 0.5 | <0.6 ± 0.0 |
| b/h RSV F1 | <1.0 ± 0.0 | <1.0 ± 0.0 | <0.8 ± 0.1 | <0.5 ± 0.0 |
| NP-P | | | | |
| b/h RSV G2 | <1.2 ± 0.2 | <1.1 ± 0.2 | <0.8 ± 0.1 | <0.8 ± 0.3 |
| b/h RSV F2 | <1.2 ± 0.1 | <1.0 ± 0.1 | <1.3 ± 0.6 | <1.6 ± 1.0 |
| RSV A2 | 4.5 ± 0.6 | 4.8 ± 0.6 | <0.6 ± 0.2 | <0.6 ± 0.1 |
| Placebo | 4.4 ± 0.1 | 4.1 ± 0.1 | 3.6 ± 0.8 | 3.1 ± 0.7 |

^{a}Virus used to immunize groups of six hamsters on day 0.
^{b}On day 28, the hamsters were challenged with 10⁶ pfu of hPIV3 or RSV A2. Four days post-challenge, the lungs and nasal turbinates of the animals were harvested.
^{c}Standard error.

### EXAMPLE 23

### Vaccination of Hamsters with Bovine Parainfluenza 3/Human Parainfluenza 3 Vectored Respiratory Syncytial Virus Induces Serum HAI and Neutralizing Antibodies

[0389] Prior to the challenge, serum samples were obtained on Day 28 from the immunized animals. The hamster sera were analyzed for the presence or RSV neutralizing antibodies using a 50% plaque reduction assay, and for PIV3 HAI serum antibodies by carrying out hemaggluination inhibition (HAI) assays (Table 8). 50% plaque reduction assay (neutralization assay) was carried out as follows: the hamster sera were two-fold serially diluted, and incubated with 100 PFU of RSV A2 for one hour. Then the virus-serum mixtures were transferred to Vero cell monolayers and overlaid with methylcellulose. After 5 days of incubation at 35° C., the monolayers were immunostained using RSV polyclonal antiserum for quantification. Hemagglutination-inhibition (HAI) assays were performed by incubating serial two-fold dilutions of Day 28 hamster sera at 25° C. for 30 min with hPIV3 in V-bottom 96-well plates. Subsequently, guinea pig erythrocytes were added to each well, incubation was continued for an additional 90 min, and the presence or absence of hemagglutination in each well was recorded.

[0390] The results showed that the viruses expressing the RSV F protein displayed RSV neutralizing antibody titers nearly as high as those observed with serum obtained from animals vaccinated with wildtype RSV (Table 12). In contrast, the viruses expressing the RSV G protein showed much lower levels of RSV neutralizing antibodies (Table 12). All of the chimeric b/h PIV3/RSV hamster sera showed levels of HAI serum antibodies that were close to the levels observed for b/h PIV3 (Table 12). The results showed that the chimeric b/h PIV3 can infect and replicate efficiently in hamsters and elicit a protective immune response.

TABLE 12
Vaccination of Hamsters with b/h PIV3/RSV
Induces Serum HAI and Neutralizing Antibodies

| | Neutralizing antibody | HAI antibody response to |
|---|---|---|
| | response to RSV^{b,c} | hPIV3^{c} (mean reciprocal |
| Virus^{a} | (mean reciprocal log₂ ± SE) | log₂ ± SE) |
| RSV | 7.9 ± 1.00 | ND |
| b/h RSV F1*N-N | 7.8 ± 0.85 | 6.6 ± 0.5 |
| b/h RSV F1 | 5.5 ± 0.53 | 5.5 ± 0.5 |
| b/h RSV G1 | 3.4 ± 0.50 | 6.6 ± 0.7 |
| b/h RSV F2 | 6.9 ± 0.65 | 6.7 ± 0.8 |
| b/h RSV G2 | 3.4 ± 0.50 | 5.2 ± 0.4 |
| b/h PIV3 | ND | 7.2 ± 0.5 |

^{a}Viruses used to immunize hamsters.
^{b}The neutralizing antibody titers were determined by a 50% plaque reduction assay.
^{c}The neutralizing antibody titers of hamster pre-serum were <1.0 and the HAI antibody titers were <4.0.

### EXAMPLE 24

### Vaccination of Hamsters with Low Dose of Bovine Parainfluenza 3/Human Parainfluenza 3 Vectored Respiratory Syncytial Virus Protected Hamsters from Challenge with Respiratory Syncytial Virus A2, and Induces Serum HAI and Neutralizing Antibodies

[0391] In order to identify the best vaccine candidate, low dose virus with different constructs (see Example 2) were used to immunize hamsters. The results of the challenging experiments are summarized in Table 13.

TABLE 13
b/h PIV3/RSV-Low Dose Immunized
Hamsters are Protected From Challenge with RSV A2

| | Replication | | Challenge with RSV A2 | |
|---|---|---|---|---|
| | Mean Virus Titer on Day 4 | | Mean Virus Titer on Day 4 | |
| | Post-vaccination | | Post-challenge | |
| | (log₁₀TCID₅₀/g tissue ± | | (log₁₀ pfu/g tissue ± | |
| | S.E.)^{b,c} | | S.E.)^{b} | |
| Immunizing | Nasal | | Nasal | |
| Virus^{a} | turbinates | Lungs | Turbinates | Lungs |
| b/h PIV3 | 4.9 ± 0.5 | 4.8 ± 1.0 | ND | ND |
| b/h RSV G1 | 3.0 ± 0.8 | 3.1 ± 0.5 | <0.9 ± 0.5 | <0.7 ± 0.4 |
| b/h RSV | 3.4 ± 0.1 | 3.5 ± 0.1 | <1.4 ± 0.7 | <0.5 ± 0.0 |
| F1* N-N | | | | |
| b/h RSV G2 | 4.1 ± 0.6 | 3.8 ± 0.4 | <0.8 ± 0.0 | <0.5 ± 0.1 |
| b/h RSV F2 | 5.2 ± 0.6 | 3.9 ± 0.4 | <0.7 ± 0.1 | <0.5 ± 0.1 |
| RSV A2 | 2.8 ± 0.3 | 2.7 ± 0.6 | <0.8 ± 0.1 | <0.5 ± 0.0 |
| Placebo | ND^{d} | ND | 3.0 ± 0.8 | 3.2 ± 0.9 |

^{a}Virus used to immunize groups of six hamsters on day 0 with a low dose of 10⁴ PFU/ml.
^{b}On day 28, the hamsters were challenged with 10⁶ pfu of RSV A2. Four days post-challenge, the lungs and nasal turbinates of the animals were harvested.
^{c}Standard error.
^{d}not determined.

[0392] Next, the neutralizing antibody titers were determined by a 50% plaque reduction assay (neutralization assay). Neutralization assays were performed for b/h PIV3, b/h PIV3/RSV chimeric viruses or RSV using Vero cells. Serial two-fold dilutions of RSV polyclonal antiserum (Biogenesis; Poole, England), an RSV F MAb (WHO 1200 MAb) obtained from MedImmune or hPIV3 F (C191/9) and HN (68/2) MAbs, were incubated with approximately 100 PFU of either b/h PIV3, b/h PIV3/RSV chimeric viruses or RSV in 0.5 ml OptiMEM at RT for 60 min. Following the incubation, virus-serum mixtures were transferred to Vero cell monolayers, incubated at 35° C. for 1 hour, overlaid with 1% methyl cellulose in EMEM/L-15 medium (JRH Biosciences; Lenexa, Kans.) and incubated at 35° C. Six days post-inoculation, the infected cell monolayers were immunostained. Neutralization titers were expressed as the reciprocal of the highest serum dilution that inhibited 50% of viral plaques. Neutralization assays were also carried out for serum obtained on Day 28 post-infection from hamsters immunized with b/h PIV3, b/h PIV3/RSV chimeric viruses, or RSV A2. The hamster sera were two-fold serially diluted, and incubated with 100 PFU of RSV A2 for one hour. Then the virus-serum mixtures were transferred to Vero cell monolayers and overlaid with methylcellulose. After 5 days of incubation at 35° C. the monolayers were immunostained using RSV polyclonal antiserum for quantification. The neutralizing antibody titers of hamster pre-serum were <1.0 and the HAI antibody titers were <4.0. Hemagglutination-inhibition (HAI) assays were performed by incubating serial two-fold dilutions of Day 28 hamster sera at 25° C. for 30 min with hPIV3 in V-bottom 96-well plates. Subsequently, guinea pig erythrocytes were added to each well, incubation was continued for an additional 90 min, and the presence or absence of hemagglutination in each well was recorded. Table 14 summarizes the results:

TABLE 14
Vaccination of Hamsters with Lower Doses of
b/h PIV3/RSV Induces Serum HAI and Neutralizing Antibodies

| | Neutralizing antibody | HAI antibody response to |
|---|---|---|
| | response to RSV^{b,c} | hPIV3^{c} (mean reciprocal |
| Virus^{a} | (mean reciprocal log₂ ± SE) | log₂ ± SE) |
| RSV | 6.5 ± 0.7 | ND |
| b/h RSV F1* N-N | 2.5 ± 0.7 | 5.7 ± 0.6 |
| b/h RSV G1 | 2.0 ± 0.0 | 6.0 ± 0.0 |
| b/h RSV F2 | 3.8 ± 1.5 | 6.7 ± 0.6 |
| b/h RSV G2 | 3.8 ± 1.3 | 5.5 ± 0.6 |
| b/h PIV3 | ND | 6.5 ± 0.7 |

^{a}Viruses used to immunize hamsters at a low dose of 10⁴ pfu/ml.
^{b}The neutralizing antibody titers were determined by a 50% plaque reduction assay.
^{c}The neutralizing antibody titers of hamster pre-serum were <1.0 and the HAI antibody titers were <4.0.

[0393] The restricted replication phenotype of the chimeric viruses possessing RSV genes in the first position was exacerbated when the inoculation dose was reduced to 1×10⁴ PFU per animal. b/h PIV3/RSV F1 and G1 replicated in the upper respiratory tracts of hamsters to titers that were reduced by 1.0-2.0 log₁₀ compared to those of b/h PIV3 (Table 13). In contrast, b/h PIV3/RSV with the RSV genes in position 2, replicated in the upper respiratory tract to levels observed for b/h PIV3. Replication in the lungs of hamsters was also more restricted for the b/h PIV3/RSV harboring RSV genes in the first position (Table 13). In contrast, b/h PIV3/RSV F2 still replicated to high titers of 10^{5.2} and 10^{3.9} in the nasal turbinates and lungs, respectively (Table 13). The vaccinated hamsters were challenged on Day 28 with 1×10⁶ pfu of RSV A2 (Table 13). Despite the low levels of replication observed in the respiratory tracts of hamsters, the animals were protected in both the lower and upper respiratory tract from challenge with RSV (Table 13). The degree of protection was as good as was observed for animals vaccinated with wt RSV. Only the animals that received placebo medium showed high virus titers in the nasal turbinates and lungs (Table 13). Serum was collected from the immunized hamsters on Day 28, and analyzed for the presence of RSV neutralizing and PIV3 HAI serum antibodies (Table 14). An approximately 50% drop in RSV neutralizing antibody titers was observed in sera obtained from hamsters immunized with b/h PIV3/RSV as compared to the titers observed for wt RSV sera (Table 14). But the sera obtained from animals that had received b/h PIV3 harboring the RSV genes in position 2, still displayed higher RSV neutralization antibody titers than was observed for sera from b/h PIV3/RSV with the RSV genes in position 1. The PIV3 HAI serum antibody titers were also slightly reduced compared to the b/h PIV3 sera (Table 14).

### EXAMPLE 25

### Bovine Parainfluenza 3/Human Parainfluenza 3 Vectored Human Metapneumovirus F Immunized Hamsters were Protected upon Challenge with Human Parainfluenza Virus 3 or Human Metapneumovirus NL/001

[0394] Five groups of Syrian Golden Hamsters (each group had six hamsters) were immunized with b/h PIV3, b/h hMPV F1, b/h hMPV F2, hMPV or placebo repectively. The five different animal groups were kept separate in micro-isolator cages. On Day 28 post-immunization, the hamsters were challenged with 1×10⁶ PFU of either hPIV3 or hMPV (NL/001 strain) to evaluate the immunogenicity induced by the b/h PIV3/hMPV F. Four days post-challenge, the animals were sacrificed. The nasal turbinates and lungs of the animals were homogenized and stored at −80° C. Virus present in the tissues was determined by TCID₅₀ assays in MDBK cells at 37° C. Virus infection was confirmed by hemabsorption with guinea pig red blood cells. Table 15 shows the replication titers of the PIV3 strain and the MPV strain in hamsters in the lungs and nasal turbinates.

TABLE 15
b/h PIV3/hMPV F-Immunized Hamsters were Protected Upon
Challenge with hPIV3 or hMPV/NL/001

| | hPIV3 | | hMPV | |
|---|---|---|---|---|
| | Mean virus titer on day 4 | | Mean virus titer on day 4 | |
| Challenge | post-challenge | | post-challenge (log₁₀ PFU/g | |
| virus: | (log₁₀TCID₅₀/g tissue S.E)^{b} | | tissue ± S.E)^{b} | |
| Immunizing | Nasal | | Nasal | |
| virus^{a} | Turbinates | Lungs | Turbinates | Lungs |
| b/h PIV3 | <1.3 ± 0.2 | <1.1 ± 0.1 | ND | |
| b/h hMPV F1 | <1.3 ± 0.1 | <1.1 ± 0.1 | 3.5 ± 0.8 | <0.5 ± 0.2 |
| b/h hMPV F2 | <1.2 ± 0.1 | <1.2 ± 0.1 | <0.9 ± 0.4 | <0.5 ± 0.1 |
| hMPV | ND | | <0.8 ± 0.3 | <0.4 ± 0.0 |
| Placebo | 4.3 ± 0.3 | 4.5 ± 0.5 | 6.0 ± 0.3 | 4.5 ± 1.3 |

^{a}Virus used to immunize groups of six hamsters on day 0.
^{b}On day 28, the hamsters were challenged with 10⁶ pfu of hPIV3 or hMPV. Four days post-challenge, the lungs and nasal turbinates of the animals were harvested.
ND = not determined.

[0395] The results showed that animals that received the b/h PIV3/hMPV F2 (F at position two) were protected completely from hMPV as well as hPIV3 (Table 15). However, b/h PIV3/hMPV F1 (F at position one) only reduced the titers of infected hMPV in the upper respiratory tract (e.g., nasal turbinates) by 2.5 logs, while it provided complete protection in the lower respiratory tract (e.g., the lung) from both hMPV and hPIV3 infection (Table 15). The animals that were administered the placebo medium displayed high titers of challenge virus in the lower and upper respiratory tracts (Table 15).

[0396] The present invention is not to be limited in scope by the specific described embodiments that are intended as single illustrations of individual aspects of the invention, and any constructs, viruses or enzymes that are functionally equivalent are within the scope of this invention. Indeed, various modifications of the invention in addition to those shown and described herein will become apparent to those skilled in the art from the foregoing description and accompanying drawings. Such modifications are intended to fall within the scope of the appended claims.

[0397] Various publications are cited herein, the disclosures of which are incorporated by reference in their entireties.

TABLE 16
LEGEND FOR SEQUENCE LISTING

| | |
|---|---|
| SEQ ID NO:1 | Human metapneumovirus isolate 00-1 matrix protein |
| | (M) and fusion protein (F) genes |
| SEQ ID NO:2 | Avian pneumovirus fusion protein gene, partial cds |
| SEQ ID NO:3 | Avian pneumovirus isolate 1b fusion protein |
| | mRNA, complete cds |
| SEQ ID NO:4 | Turkey rhinotracheitis virus gene for fusion protein (F1 |
| | and F2 subunits), complete cds |
| SEQ ID NO:5 | Avian pneumovirus matrix protein (M) gene, partial |
| | cds and Avian pneumovirus fusion glycoprotein (F) |
| | gene, complete cds |
| SEQ ID NO:6 | paramyxovirus F protein hRSV B |
| SEQ ID NO:7 | paramyxovirus F protein hRSV A2 |
| SEQ ID NO:8 | human metapneumovirus 01-71 (partial sequence) |
| SEQ ID NO:9 | Human metapneumovirus isolate 00-1 matrix protein |
| | (M) and fusion protein (F) genes |
| SEQ ID NO:10 | Avian pneumovirus fusion protein gene, partial cds |
| SEQ ID NO:11 | Avian pneumovirus isolate lb fusion protein |
| | mRNA, complete cds |
| SEQ ID NO:12 | Turkey rhinotracheitis virus gene for fusion protein (F1 |
| | and F2 subunits), complete cds |
| SEQ ID NO:13 | Avian pneumovirus fusion glycoprotein (F) gene, |
| | complete cds |
| SEQ ID NO:14 | Turkey rhinotracheitis virus (strain CVL14/1) |
| | attachment protien (G) mRNA, complete cds |
| SEQ ID NO:15 | Turkey rhinotracheitis virus (strain 6574) attachment |
| | protein (G), complete cds |
| SEQ ID NO:16 | Turkey rhinotracheitis virus (strain CVL14/1) |
| | attachment protein (G) mRNA, complete cds |
| SEQ ID NO:17 | Turkey rhinotracheitis virus (strain 6574) attachment |
| | protein (G), complete cds |
| SEQ ID NO:18 | F protein sequence for HMPV isolate NL/1/00 |
| SEQ ID NO:19 | F protein sequence for HMPV isolate NL/17/00 |
| SEQ ID NO:20 | F protein sequence for HMPV isolate NL/1/99 |
| SEQ ID NO:21 | F protein sequence for HMPV isolate NL/1/94 |
| SEQ ID NO:22 | F-gene sequence for HMPV isolate NL/1/00 |
| SEQ ID NO:23 | F-gene sequence for HMPV isolate NL/17/00 |
| SEQ ID NO:24 | F-gene sequence for HMPV isolate NL/1/99 |
| SEQ ID NO:25 | F-gene sequience for HMPV isolate NL/1/94 |
| SEQ ID NO:26 | G protein sequence for HMPV isolate NL/1/00 |
| SEQ ID NO:27 | G protein sequence for HMPV isolate NL/17/00 |
| SEQ ID NO:28 | G protein sequence for HMPV isolate NL/1/99 |
| SEQ ID NO:29 | G protein sequence for HMPV isolate NL/1/94 |
| SEQ ID NO:30 | G-gene sequence for HMPV isolate NL/1/00 |
| SEQ ID NO:31 | G-gene sequence for HMPV isolate NL/17/00 |
| SEQ ID NO:32 | G-gene sequence for HMPV isolate NL/1/99 |
| SEQ ID NO:33 | G-gene sequence for HMPV isolate NL/1/94 |
| SEQ ID NO:34 | L protein sequence for HMPV isolate NL/1/00 |
| SEQ ID NO:35 | L protein sequence for HMPV isolate NL/17/00 |
| SEQ ID NO:36 | L protein sequence for HMPV isolate NL/1/99 |
| SEQ ID NO:37 | L protein sequence for HMPV isolate NL/1/94 |
| SEQ ID NO:38 | L-gene sequence for HMPV isolate NL/1/00 |
| SEQ ID NO:39 | L-gene sequence for HMPV isolate NL/17/00 |
| SEQ ID NO:40 | L-gene sequence for HMPV isolate NL/1/99 |
| SEQ ID NO:41 | L-gene sequence for HMPV isolate NL/1/94 |
| SEQ ID NO:42 | M2-1 protein sequence for HMPV isolate NL/1/00 |
| SEQ ID NO:43 | M2-1 protein sequence for HMPV isolate NL/17/00 |
| SEQ ID NO:44 | M2-1 protein sequence for HMPV isolate NL/1/99 |
| SEQ ID NO:45 | M2-1 protein sequence for HMPV isolate NL/1/94 |
| SEQ ID NO:46 | M2-1 gene sequence for HMPV isolate NL/1/00 |
| SEQ ID NO:47 | M2-1 gene sequence for HMPV isolate NL/17/00 |
| SEQ ID NO:48 | M2-1 gene sequence for HMPV isolate NL/1/99 |
| SEQ ID NO:49 | M2-1 gene sequence for HMPV isolate NL/1/94 |
| SEQ ID NO:50 | M2-2 protein sequence for HMPV isolate NL/1/00 |
| SEQ ID NO:51 | M2-2 protein sequence for HMPV isolate NL/17/00 |
| SEQ ID NO:52 | M2-2 protein sequence for HMPV isolate NL/1/99 |
| SEQ ID NO:53 | M2-2 protein sequence for HMPV isolate NL/1/94 |
| SEQ ID NO:54 | M2-2 gene sequence for HMPV isolate NL/1/00 |
| SEQ ID NO:55 | M2-2 gene sequence for HMPV isolate NL/17/00 |
| SEQ ID NO:56 | M2-2 gene sequence for HMPV isolate NL/1/99 |
| SEQ ID NO:57 | M2-2 gene sequence for HMPV isolate NL/1/94 |
| SEQ ID NO:58 | M2 gene sequence for HMPV isolate NL/1/00 |
| SEQ ID NO:59 | M2 gene sequence for HMPV isolate NL/17/00 |
| SEQ ID NO:60 | M2 gene sequence for HMPV isolate NL/1/99 |
| SEQ ID NO:61 | M2 gene sequence for HMPV isolate NL/1/94 |
| SEQ ID NO:62 | M protein sequence for HMPV isolate NL/1/00 |
| SEQ ID NO:63 | M protein sequence for HMPV isolate NL/17/00 |
| SEQ ID NO:64 | M protein sequence for HMPV isolate NL/1/99 |
| SEQ ID NO:65 | M protein sequence for HMPV isolate NL/1/94 |
| SEQ ID NO:66 | M gene sequence for HMPV isolate NL/1/00 |
| SEQ ID NO:67 | M gene sequence for HMPV isolate NL/17/00 |
| SEQ ID NO:68 | M gene sequence for HMPV isolate NL/1/99 |
| SEQ ID NO:69 | M gene sequence for HMPV isolate NL/1/94 |
| SEQ ID NO:70 | N protein sequence for HMPV isolate NL/1/00 |
| SEQ ID NO:71 | N protein sequence for HMPV isolate NL/17/00 |
| SEQ ID NO:72 | N protein sequence for HMPV isolate NL/1/99 |
| SEQ ID NO:73 | N protein sequence for HMPV isolate NL/1/94 |
| SEQ ID NO:74 | N gene sequence for HMPV isolate NL/1/00 |
| SEQ ID NO:75 | N gene sequence for HMPV isolate NL/17/00 |
| SEQ ID NO:76 | N gene sequence for HMPV isolate NL/1/99 |
| SEQ ID NO:77 | N gene sequence for HMPV isolate NL/1/94 |
| SEQ ID NO:78 | P protein sequence for HMPV isolate NL/1/00 |
| SEQ ID NO:79 | P protein sequence for HMPV isolate NL/17/00 |
| SEQ ID NO:80 | P protein sequence for HMPV isolate NL/1/99 |
| SEQ ID NO:81 | P protein sequence for HMPV isolate NL/1/94 |
| SEQ ID NO:82 | P gene sequence for HMPV isolate NL/1/00 |
| SEQ ID NO:83 | P gene sequence for HMPV isolate NL/17/00 |
| SEQ ID NO:84 | P gene sequence for HMPV isolate NL/1/99 |
| SEQ ID NO:85 | P gene sequence for HMPV isolate NL/1/94 |
| SEQ ID NO:86 | SH protein sequence for HMPV isolate NL/1/00 |
| SEQ ID NO:87 | SH protein sequence for HMPV isolate NL/17/00 |
| SEQ ID NO:88 | SN protein sequence for HMPV isolate NL/1/99 |
| SEQ ID NO:89 | SH protein sequence for HMPV isolate NL/1/94 |
| SEQ ID NO:90 | SH gene sequence for HMPV isolate NL/1/00 |
| SEQ ID NO:91 | SH gene sequence for HMPV isolate NL/17/00 |
| SEQ ID NO:92 | SH gene sequence for HMPV isolate NL/1/99 |
| SEQ ID NO:93 | SH gene sequence for HMPV isolate NL/1/94 |
| SEQ ID NO:94 | isolate NL/1/99 (99-1) HMPV (Human |
| | Metapneumovirus) cDNA sequence |
| SEQ ID NO:95 | isolate NL/1/00 (00-1) HMPV cDNA sequence |
| SEQ ID NO:96 | isolate NL/17/00 HMPV cDNA sequence |
| SEQ ID NO:97 | isolate NL/1/94 HMPV cDNA sequence |
| SEQ ID NO:98 | G-gene coding sequence for isolate NL/1/00 (A1) |
| SEQ ID NO:99 | G-gene coding sequence for isolate BR/2/01 (A1) |
| SEQ ID NO:100 | G-gene coding sequence for isolate FL/4/01 (A1) |
| SEQ ID NO:101 | G-gene coding sequence for isolate FL/3/01 (A1) |
| SEQ ID NO:102 | G-gene coding sequence for isolate FL/8/01 (A1) |
| SEQ ID NO:103 | G-gene coding sequence for isolate FL/10/01 (A1) |
| SEQ ID NO:104 | G-gene coding sequence for isolate NL/10/01 (A1) |
| SEQ ID NO:105 | G-gene coding sequence for isolate NL/2/02 (A1) |
| SEQ ID NO:106 | G-gene coding sequence for isolate NL/17/00 (A2) |
| SEQ ID NO:107 | G-gene coding sequence for isolate NL/1/81 (A2) |
| SEQ ID NO:108 | G-gene coding sequence for isolate NL/1/93 (A2) |
| SEQ ID NO:109 | G-gene coding sequence for isolate NL/2/93 (A2) |
| SEQ ID NO:110 | G-gene coding sequence for isolate NL/3/93 (A2) |
| SEQ ID NO:111 | G-gene coding sequence for isolate NL/1/95 (A2) |
| SEQ ID NO:112 | G-gene coding sequence for isolate NL/2/96 (A2) |
| SEQ ID NO:113 | G-gene coding sequence for isolate NL/3/96 (A2) |
| SEQ ID NO:114 | G-gene coding sequence for isolate NL/22/01 (A2) |
| SEQ ID NO:115 | G-gene coding sequence for isolate NL/24/02 (A2) |
| SEQ ID NO:116 | G-gene coding sequence for isolate NL/23/01 (A2) |
| SEQ ID NO:117 | G-gene coding sequence for isolate NL/29/01 (A2) |
| SEQ ID NO:118 | G-gene coding sequence for isolate NL/3/02 (A2) |
| SEQ ID NO:119 | G-gene coding sequence for isolate NL/1/99 (B1) |
| SEQ ID NO:120 | G-gene coding sequence for isolate NL/11/00 (B1) |
| SEQ ID NO:121 | G-gene coding sequence for isolate NL/12/00 (B1) |
| SEQ ID NO:122 | G-gene coding sequence for isolate NL/5/01 (B1) |
| SEQ ID NO:123 | G-gene coding sequence for isolate NL/9/01 (B1) |
| SEQ ID NO:124 | G-gene coding sequence for isolate NL/21/01 (B1) |
| SEQ ID NO:125 | G-gene coding sequence for isolate NL/1/94 (B2) |
| SEQ ID NO:126 | G-gene coding sequence for isolate NL/1/82 (B2) |
| SEQ ID NO:127 | G-gene coding sequence for isolate NL/1/96 (B2) |
| SEQ ID NO:128 | G-gene coding sequence for isolate NL/6/97 (B2) |
| SEQ ID NO:129 | G-gene coding sequence for isolate NL/9/00 (B2) |
| SEQ ID NO:130 | G-gene coding sequence for isolate NL/3/01 (B2) |
| SEQ ID NO:131 | G-gene coding sequence for isolate NL/4/01 (B2) |
| SEQ ID NO:132 | G-gene coding sequence for isolate UK/5/01 (B2) |
| SEQ ID NO:133 | G-protein sequence for isolate NL/1/00 (A1) |
| SEQ ID NO:134 | G-protein sequence for isolate BR/2/01 (A1) |
| SEQ ID NO:135 | G-protein sequence for isolate FL/4/01 (A1) |
| SEQ ID NO:136 | G-protein sequence for isolate FL/3/01 (A1) |
| SEQ ID NO:137 | G-protein sequence for isolate FL/8/01 (A1) |
| SEQ ID NO:138 | G-protein sequence for isolate FL/10/01 (A1) |
| SEQ ID NO:139 | G-protein sequence for isolate NL/10/01 (A1) |
| SEQ ID NO:140 | G-protein sequence for isolate NL/2/02 (A1) |
| SEQ ID NO:141 | G-protein sequence for isolate NL/17/00 (A2) |
| SEQ ID NO:142 | G-protein sequence for isolate NL/1/81 (A2) |
| SEQ ID NO:143 | G-protein sequence for isolate NL/1/93 (A2) |
| SEQ ID NO:144 | G-protein sequence for isolate NL/2/93 (A2) |
| SEQ ID NO:145 | G-protein sequence for isolate NL/3/93 (A2) |
| SEQ ID NO:146 | G-protein sequence for isolate NL/1/95 (A2) |
| SEQ ID NO:147 | G-protein sequence for isolate NL/2/96 (A2) |
| SEQ ID NO:148 | G-protein sequence for isolate NL/3/96 (A2) |
| SEQ ID NO:149 | G-protein sequence for isolate NL/22/01 (A2) |
| SEQ ID NO:150 | G-protein sequence for isolate NL/24/01 (A2) |
| SEQ ID NO:151 | G-protein sequence for isolate NL/23/01 (A2) |
| SEQ ID NO:152 | G-protein sequence for isolate NL/29/01 (A2) |
| SEQ ID NO:153 | G-protein sequence for isolate NL/3/02 (A2) |
| SEQ ID NO:154 | G-protein sequence for isolate NL/1/99 (B1) |
| SEQ ID NO:155 | G-protein sequence for isolate NL/11/00 (B1) |
| SEQ ID NO:156 | G-protein sequence for isolate NL/12/00 (B1) |
| SEQ ID NO:157 | G-protein sequence for isolate NL/5/01 (B1) |
| SEQ ID NO:158 | G-protein sequence for isolate NL/9/01 (B1) |
| SEQ ID NO:159 | G-protein sequence for isolate NL/21/01 (B1) |
| SEQ ID NO:160 | G-protein sequence for isolate NL/1/94 (B2) |
| SEQ ID NO:161 | G-protein sequence for isolate NL/1/82 (B2) |
| SEQ ID NO:162 | G-protein sequence for isolate NL/1/96 (B2) |
| SEQ ID NO:163 | G-protein sequence for isolate NL/6/97 (B2) |
| SEQ ID NO:164 | G-protein sequence for isolate NL/9/00 (B2) |
| SEQ ID NO:165 | G-protein sequence for isolate NL/3/01 (B2) |
| SEQ ID NO:166 | G-protein sequence for isolate NL/4/01 (B2) |
| SEQ ID NO:167 | G-protein sequence for isolate NL/5/01 (B2) |
| SEQ ID NO:168 | F-gene coding sequence for isolate NL/1/00 |
| SEQ ID NO:169 | F-gene coding sequence for isolate UK/1/00 |
| SEQ ID NO:170 | F-gene coding sequence for isolate NL/2/00 |
| SEQ ID NO:171 | F-gene coding sequence for isolate NL/13/00 |
| SEQ ID NO:172 | F-gene coding sequence for isolate NL/14/00 |
| SEQ ID NO:173 | F-gene coding sequence for isolate FL/3/01 |
| SEQ ID NO:174 | F-gene coding sequence for isolate FL/4/01 |
| SEQ ID NO:175 | F-gene coding sequence for isolate FL/8/01 |
| SEQ ID NO:176 | F-gene coding sequence for isolate UK/1/01 |
| SEQ ID NO:177 | F-gene coding sequence for isolate UK/7/01 |
| SEQ ID NO:178 | F-gene coding sequence for isolate FL/10/01 |
| SEQ ID NO:179 | F-gene coding sequence for isolate NL/6/01 |
| SEQ ID NO:180 | F-gene coding sequence for isolate NL/8/01 |
| SEQ ID NO:181 | F-gene coding sequence for isolate NL/10/01 |
| SEQ ID NO:182 | F-gene coding sequence for isolate NL/14/01 |
| SEQ ID NO:183 | F-gene coding sequence for isolate NL/20/01 |
| SEQ ID NO:184 | F-gene coding sequence for isolate NL/25/01 |
| SEQ ID NO:185 | F-gene coding sequence for isolate NL/26/01 |
| SEQ ID NO:186 | F-gene coding sequence for isolate NL/28/01 |
| SEQ ID NO:187 | F-gene coding sequence for isolate NL/30/01 |
| SEQ ID NO:188 | F-gene coding sequence for isolate BR/2/01 |
| SEQ ID NO:189 | F-gene coding sequence for isolate BR/3/01 |
| SEQ ID NO:190 | F-gene coding sequence for isolate NL/2/02 |
| SEQ ID NO:191 | F-gene coding sequence for isolate NL/4/02 |
| SEQ ID NO:192 | F-gene coding sequence for isolate NL/5/02 |
| SEQ ID NO:193 | F-gene coding sequence for isolate NL/6/02 |
| SEQ ID NO:194 | F-gene coding sequence for isolate NL/7/02 |
| SEQ ID NO:195 | F-gene coding sequence for isolate NL/9/02 |
| SEQ ID NO:196 | F-gene coding sequence for isolate FL/1/02 |
| SEQ ID NO:197 | F-gene coding sequence for isolate NL/1/81 |
| SEQ ID NO:198 | F-gene coding sequence for isolate NL/1/93 |
| SEQ ID NO:199 | F-gene coding sequence for isolate NL/2/93 |
| SEQ ID NO:200 | F-gene coding sequence for isolate NL/4/93 |
| SEQ ID NO:201 | F-gene coding sequence for isolate NL/1/95 |
| SEQ ID NO:202 | F-gene coding sequence for isolate NL/2/96 |
| SEQ ID NO:203 | F-gene coding sequence for isolate NL/3/96 |
| SEQ ID NO:204 | F-gene coding sequence for isolate NL/1/98 |
| SEQ ID NO:205 | F-gene coding sequence for isolate NL/17/00 |
| SEQ ID NO:206 | F-gene coding sequence for isolate NL/22/01 |
| SEQ ID NO:207 | F-gene coding sequence for isolate NL/29/01 |
| SEQ ID NO:208 | F-gene coding sequence for isolate NL/23/01 |
| SEQ ID NO:209 | F-gene coding sequence for isolate NL/17/01 |
| SEQ ID NO:210 | F-gene coding sequence for isolate NL/24/01 |
| SEQ ID NO:211 | F-gene coding sequence for isolate NL/3/02 |
| SEQ ID NO:212 | F-gene coding sequence for isolate NL/3/98 |
| SEQ ID NO:213 | F-gene coding sequence for isolate NL/1/99 |
| SEQ ID NO:214 | F-gene coding sequence for isolate NL/2/99 |
| SEQ ID NO:215 | F-gene coding sequence for isolate NL/3/99 |
| SEQ ID NO:216 | F-gene coding sequence, for isolate NL/11/00 |
| SEQ ID NO:217 | F-gene coding sequence for isolate NL/12/00 |
| SEQ ID NO:218 | F-gene coding sequence for isolate NL/1/01 |
| SEQ ID NO:219 | F-gene coding sequence for isolate NL/5/01 |
| SEQ ID NO:220 | F-gene coding sequence for isolate NL/9/01 |
| SEQ ID NO:221 | F-gene coding sequence for isolate NL/19/01 |
| SEQ ID NO:222 | F-gene coding sequence for isolate NL/21/01 |
| SEQ ID NO:223 | F-gene coding sequence for isolate UK/11/01 |
| SEQ ID NO:224 | F-gene coding sequence for isolate FL/1/01 |
| SEQ ID NO:225 | F-gene coding sequence for isolate FL/2/01 |
| SEQ ID NO:226 | F-gene coding sequence for isolate FL/5/01 |
| SEQ ID NO:227 | F-gene coding sequence for isolate FL/7/01 |
| SEQ ID NO:228 | F-gene coding sequence for isolate FL/9/01 |
| SEQ ID NO:229 | F-gene coding sequence for isolate UK/10/01 |
| SEQ ID NO:230 | F-gene coding sequence for isolate NL/1/02 |
| SEQ ID NO:231 | F-gene coding sequence for isolate NL/1/94 |
| SEQ ID NO:232 | F-gene coding sequence for isolate NL/1/96 |
| SEQ ID NO:233 | F-gene coding sequence for isolate NL/6/97 |
| SEQ ID NO:234 | F-gene coding sequence for isolate NL/7/00 |
| SEQ ID NO:235 | F-gene coding sequence for isolate NL/9/00 |
| SEQ ID NO:236 | F-gene coding sequence for isolate NL/19/00 |
| SEQ ID NO:237 | F-gene coding sequence for isolate NL/28/00 |
| SEQ ID NO:238 | F-gene coding sequence for isolate NL/3/01 |
| SEQ ID NO:239 | F-gene coding sequence for isolate NL/4/01 |
| SEQ ID NO:240 | F-gene coding sequence for isolate NL/11/01 |
| SEQ ID NO:241 | F-gene coding sequence for isolate NL/15/01 |
| SEQ ID NO:242 | F-gene coding sequence for isolate NL/18/01 |
| SEQ ID NO:243 | F-gene coding sequence for isolate FL/6/01 |
| SEQ ID NO:244 | F-gene coding sequence for isolate UK/5/01 |
| SEQ ID NO:245 | F-gene coding sequence for isolate UK/8/01 |
| SEQ ID NO:246 | F-gene coding sequence for isolate NL/12/02 |
| SEQ ID NO:247 | F-gene coding sequence for isolate HK/1/02 |
| SEQ ID NO:248 | F-protein sequence for isolate NL/1/00 |
| SEQ ID NO:249 | F-protein sequence for isolate UK/1/00 |
| SEQ ID NO:250 | F-protein sequence for isolate NL/2/00 |
| SEQ ID NO:251 | F-protein sequence for isolate NL/13/00 |
| SEQ ID NO:252 | F-protein sequence for isolate NL/14/00 |
| SEQ ID NO:253 | F-protein sequence for isolate FL/3/01 |
| SEQ ID NO:254 | F-protein sequence for isolate FL/4/01 |
| SEQ ID NO:255 | F-protein sequence for isolate FL/8/01 |
| SEQ ID NO:256 | F-protein sequence for isolate UK/1/01 |
| SEQ ID NO:257 | F-protein sequence for isolate UK/7/01 |
| SEQ ID NO:258 | F-protein sequence for iso1ate FL/10/01 |
| SEQ ID NO:259 | F-protein sequence for isolate NL/6/01 |
| SEQ ID NO:260 | F-protein sequence for isolate NL/8/01 |
| SEQ ID NO:261 | F-protein sequence for isolate NL/10/01 |
| SEQ ID NO:262 | F-protein sequence for isolate NL/14/01 |
| SEQ ID NO:263 | F-protein sequence for isolate NL/20/01 |
| SEQ ID NO:264 | F-protein sequence for isolate NL/25/01 |
| SEQ ID NO:265 | F-protein sequence for isolate NL/26/01 |
| SEQ ID NO:266 | F-protein sequence for isolate NL/28/01 |
| SEQ ID NO:267 | F-protein sequence for isolate NL/30/01 |
| SEQ ID NO:268 | F-protein sequence for isolate BR/2/01 |
| SEQ ID NO:269 | F-protein sequence for isolate BR/3/01 |
| SEQ ID NO:270 | F-protein sequence for isolate NL/2/02 |
| SEQ ID NO:271 | F-protein sequence for isolate NL/4/02 |
| SEQ ID NO:272 | F-protein sequence for isolate NL/5/02 |
| SEQ ID NO:273 | F-protein sequence for isolate NL/6/02 |
| SEQ ID NO:274 | F-protein sequence for isolate NL/7/02 |
| SEQ ID NO:275 | F-protein sequence for isolate NL/9/02 |
| SEQ ID NO:276 | F-protein sequence for isolate FL/1/02 |
| SEQ ID NO:277 | F-protein sequence for isolate NL/1/81 |
| SEQ ID NO:278 | F-protein sequence for isolate NL/1/93 |
| SEQ ID NO:279 | F-protein sequence for isolate NL/2/93 |
| SEQ ID NO:280 | F-protein sequence for isolate NL/4/93 |
| SEQ ID NO:281 | F-protein sequence for isolate NL/1/95 |
| SEQ ID NO:282 | F-protein sequence for isolate NL/2/96 |
| SEQ ID NO:283 | F-protein sequence for isolate NL/3/96 |
| SEQ ID NO:284 | F-protein sequence for isolate NL/1/98 |
| SEQ ID NO:285 | F-protein sequence for isolate NL/17/00 |
| SEQ ID NO:286 | F-protein sequence for isolate NL/22/01 |
| SEQ ID NO:287 | F-protein sequence for isolate NL/29/01 |
| SEQ ID NO:288 | F-protein sequence for isolate NL/23/01 |
| SEQ ID NO:289 | F-protein sequence for isolate NL/17/01 |
| SEQ ID NO:290 | F-protein sequence for isolate NL/24/01 |
| SEQ ID NO:291 | F-protein sequence for isolate NL/3/02 |
| SEQ ID NO:292 | F-protein sequence for isolate NL/3/98 |
| SEQ ID NO:293 | F-protein sequence for isolate NL/1/99 |
| SEQ ID NO:294 | F-protein sequence for isolate NL/2/99 |
| SEQ ID NO:295 | F-protein sequence for isolate NL/3/99 |
| SEQ ID NO:296 | F-protein sequence for isolate NL/11/00 |
| SEQ ID NO:297 | F-protein sequence for isolate NL/12/00 |
| SEQ ID NO:298 | F-protein sequence for isolate NL/1/01 |
| SEQ ID NO:299 | F-protein sequence for isolate NL/5/01 |
| SEQ ID NO:300 | F-protein sequence for isolate NL/9/01 |
| SEQ ID NO:301 | F-protein sequence for isolate NL/19/01 |
| SEQ ID NO:302 | F-protein sequence for isolate NL/21/01 |
| SEQ ID NO:303 | F-protein sequence for isolate UK/11/01 |
| SEQ ID NO:304 | F-protein sequence for isolate FL/1/01 |
| SEQ ID NO:305 | F-protein sequence for isolate FL/2/01 |
| SEQ ID NO:306 | F-protein sequence for isolate FL/5/01 |
| SEQ ID NO:307 | F-protein sequence for isolate FL/7/01 |
| SEQ ID NO:308 | F-protein sequence for isolate FL/9/01 |
| SEQ ID NO:309 | F-protein sequence for isolate UK/10/01 |
| SEQ ID NO:310 | F-protein sequence for isolate NL/1/02 |
| SEQ ID NO:311 | F-protein sequence for isolate NL/1/94 |
| SEQ ID NO:312 | F-protein sequence for isolate NL/1/96 |
| SEQ ID NO:313 | F-protein sequence for isolate NL/6/97 |
| SEQ ID NO:314 | F-protein sequence for isolate NL/7/00 |
| SEQ ID NO:315 | F-protein sequence for isolate NL/9/00 |
| SEQ ID NO:316 | F-protein sequence for isolate NL/19/00 |
| SEQ ID NO:317 | F-protein sequence for isolate NL/28/00 |
| SEQ ID NO:318 | F-protein sequence for isolate NL/3/01 |
| SEQ ID NO:319 | F-protein sequence for isolate NL/4/01 |
| SEQ ID NO:320 | F-protein sequence for isolate NL/11/01 |
| SEQ ID NO:321 | F-protein sequence for isolate NL/15/01 |
| SEQ ID NO:322 | F-protein sequence for isolate NL/18/01 |
| SEQ ID NO:323 | F-protein sequence for isolate FL/6/01 |
| SEQ ID NO:324 | F-protein sequence for isolate UK/5/01 |
| SEQ ID NO:325 | F-protein sequence for isolate UK/8/01 |
| SEQ ID NO:326 | F-protein sequence for isolate NL/12/02 |
| SEQ ID NO:327 | F-protein sequence for isolate HK/1/02 |

The application's sequence listing, which the Patent Office published only in electronic form, follows.

SEQUENCE LISTING (327 sequences)

SEQ ID NO: 1 - DNA, 2507 bp, metapneumovirus
  CDS (1)...(2507): Human metapneumovirus isolate 00-1 matrix protein (M) and fusion protein (F) genes
atggagtcctacctagtagacacctatcaaggcattccttacacagcagctgttcaagttgatctaatagaaaaggacctgttacctgcaagcctaacaatatggttccctttgtttcaggccaacacaccaccagcagtgctgctcgatcagctaaaaaccctgacaataaccactctgtatgctgcatcacaaaatggtccaatactcaaagtgaatgcatcagcccaaggtgcagcaatgtctgtacttcccaaaaaatttgaagtcaatgcgactgtagcactcgatgaatatagcaaactggaatttgacaaactcacagtctgtgaagtaaaaacagtttacttaacaaccatgaaaccatacgggatggtatcaaaatttgtgagctcagccaaatcagttggcaaaaaaacacatgatctaatcgcactatgtgattttatggatctagaaaagaacacacctgttacaataccagcattcatcaaatcagtttcaatcaaagagagtgagtcagctactgttgaagctgctataagcagtgaagcagaccaagctctaacacaggccaaaattgcaccttatgcgggattaattatgatcatgactatgaacaatcccaaaggcatattcaaaaagcttggagctgggactcaagtcatagtagaactaggagcatatgtccaggctgaaagcataagcaaaatatgcaagacttggagccatcaagggacaagatatgtcttgaagtccagataacaaccaagcaccttggccaagagctactaaccctatctcatagatcataaagtcaccattctagttatataaaaatcaagttagaacaagaattaaatcaatcaagaacgggacaaataaaaatgtcttggaaagtggtgatcattttttcattgttaataacacctcaacacggtcttaaagagagctacttagaagagtcatgtagcactataactgaaggatatctcagtgttctgaggacaggttggtacaccaatgtttttacactggaggtaggcgatgtagagaaccttacatgtgccgatggacccagcttaataaaaacagaattagacctgaccaaaagtgcactaagagagctcagaacagtttctgctgatcaactggcaagagaggagcaaattgaaaatcccagacaatctagattcgttctaggagcaatagcactcggtgttgcaactgcagctgcagttacagcaggtgttgcaattgccaaaaccatccggcttgaaagtgaagtaacagcaattaagaatgccctcaaaaagaccaatgaagcagtatctacattggggaatggagttcgtgtgttggcaactgcagtgagagagctgaaagattttgtgagcaagaatctaacacgtgcaatcaacaaaaacaagtgcgacattgctgacctgaaaatggccgttagcttcagtcaattcaacagaaggttcctaaatgttgtgcggcaattttcagacaacgctggaataacaccagcaatatctttggacttaatgacagatgctgaactagccagagctgtttccaacatgccaacatctgcaggacaaataaaactgatgttggagaaccgtgcaatggtaagaagaaaagggttcggattcctgataggagtttacggaagctccgtaatttacatggtgcaactgccaatctttggggttatagacacgccttgctggatagtaaaagcagccccttcttgttcaggaaaaaagggaaactatgcttgcctcttaagagaagaccaaggatggtattgtcaaaatgcagggtcaactgtttactacccaaatgaaaaagactgtgaaacaagaggagaccatgtcttttgcgacacagcagcaggaatcaatgttgctgagcagtcaaaggagtgcaacataaacatatctactactaattacccatgcaaagttagcacaggaagacatcctatcagtatggttgcactatctcctcttggggctttggttgcttgctacaagggagtgagctgttccattggcagcaacagagtagggatcatcaagcaactgaacaaaggctgctcttatataaccaaccaagacgcagacacagtgacaatagacaacactgtataccagctaagcaaagttgaaggcgaacagcatgttataaaaggaaggccagtgtcaagcagctttgacccagtcaagtttcctgaagatcaattcaatgttgcacttgaccaagttttcgagagcattgagaacagtcaggccttggtggatcaatcaaacagaatcctaagcagtgcagagaaaggaaacactggcttcatcattgtaataattctaattgctgtccttggctctaccatgatcctagtgagtgtttttatcataataaagaaaacaaagagacccacaggagcacctccagagctgagtggtgtcacaaacaatggcttcataccacataattag

SEQ ID NO: 2 - DNA, 1596 bp, pneumvirus
  CDS (1)...(1596): Avian pneumovirus fusion protein gene, partial cds
atgtcttggaaagtggtactgctattggtattgctagctaccccaacgggggggctagaagaaagttatctagaggagtcatgcagtactgttactagaggatacctgagtgttttgaggacaggatggtatacaaatgtgttcacacttggggttggagatgtgaaaaatctcacatgtaccgacgggcccagcttaataagaacagaacttgaactgacaaaaaatgcacttgaggaactcaagacagtatcagcagatcaattggcaaaggaagctaggataatgtcaccaagaaaagcccggtttgttctgggtgccatagcattaggtgtggcaactgctgctgctgtgacggctggtgtagcgatagccaagacaattaggctagaaggagaagtggctgcaatcaaaggtgcgctcaggaaaacaaatgaggctgtatctacattaggaaatggcgtgagggtacttgcaacagctgtgaatgatctcaaggactttataagtaaaaaattgacacctgcaataaacaggaacaagtgtgacatctcagaccttaagatggcagtgagctttggacaatacaatcggaggttcctcaatgtggtaagacagttttctgacaatgcaggtattacgcctgcaatatctctagatttaatgactgacgctgagcttgtaagagctgtaagcaacatgcccacatcttcaggacagatcaatctgatgcttgagaatcgggcaatggtcagaaggaaaggatttgggattttgattggagtttatggtagctctgtggtctatatagtgcagcttcctattttcggtgtgatagatacaccgtgttggagggtgaaggctgctccattatgttcagggaaagacgggaattatgcatgtctcttgcgagaggaccaaggttggtattgtcaaaatgctggatccacagtttattatccaaatgaggaggactgtgaagtaagaagtgatcatgtgttttgtgacacagcagctgggataaatgtagcaaaggagtcagaagagtgcaacaggaatatctcaacaacaaagtacccttgcaaggtaagtacagggcgtcacccaataagcatggtggccttatcaccactgggtgctttggtagcctgttatgacggtatgagttgttccattggaagcaacaaggttggaataatcagacctttggggaaagggtgttcatacatcagcaatcaagatgctgacactgttacaattgacaacacagtgtaccaattgagcaaagttgaaggagaacaacacacaattaaagggaagccagtatctagcaattttgaccctatagagttccctgaagatcagttcaacgtagccctggatcaggtgtttgaaagtgttgagaagagtcagaatctgatagaccagtcaaacaagatattggatagcattgaaaaggggaatgcaggatttgtcatagtgatagtcctcattgtcctgctcatgctggcagcagttggtgtgggtgtcttctttgtggttaagaagagaaaagctgctcccaaattcccaatggaaatgaatggtgtgaacaac

SEQ ID NO: 3 - DNA, 1666 bp, pneumovirus
  CDS (14)...(1627): Avian pneumovirus isolate 1b fusion protein mRNA, complete cds
gggacaagtgaaaatgtcttggaaagtggtactgctattggtattgctagctaccccaacgggggggctagaagaaagttatctagaggagtcatgcagtactgttactagaggatacctgagtgttttgaggacaggatggtatacaaatgtgttcacacttgaggttggagatgtggaaaatctcacatgtaccgacgggcccagcttaataagaacagaacttgaactgacaaaaaatgcacttgaggaactcaagacagtatcagcagatcaattggcaaaggaagctaggataatgtcaccaagaaaagcccggtttgttctgggtgccatagcattaggtgtggcaactgctgctgctgtgacggctggtgtagcgatagccaagacaattaggctagaaggagaagtggctgcaatcaagggtgcgctcaggaaaacaaatgaggctgtatctacattaggaaatggcgtgagggtacttgcaacagctgtgaatgatctcaaggactttataagtaaaaaattgacacctgcaataaacaggaacaagtgtgacatctcagaccttaagatggcagtgagctttggacaatacaatcggaggttcctcaatgtggtaagacagttttctgacaatgcaggtattacgcctgcaatatctctagatttaatgactgacgctgagcttgtaagagctgtaagcaacatgcccacatcttcaggacagatcaatctgatgcttgagaatcgggcaatggtcagaaggaaaggatttgggattttgattggagtttatggtagctctgtggtctatatagtgcagcttcctattttcggtgtgatagatacaccgtgttggaaggtgaaggctgctccattatgttcagggaaagacgggaattatgcatgtctcttgcgagaggaccaaggttggtattgtcaaaatgctggatccacagtttattatccaaatgaggaggactgtgaagtaagaagtgatcatgtgttttgtgacacagcagctgggataaatgtagcaaaggagtcagaagagtgcaacaggaatatctcaacaacaaagtacccttgcaaggtaagtacagggcgtcacccaataagcatggtggccttatcaccactgggtgctttggtagcctgttatgacggtatgagttgttccattggaagcaacaaggttggaataatcagacctttggggaaagggtgttcatacatcagcaatcaagatgctgacactgttacaattgacaacacagtgtaccaattgagcaaagttgaaggagaacaacacacaattaaagggaagccagtatctagcaattttgaccctatagagttccctgaagatcagttcaacgtagccctggatcaggtgtttgaaagtgttgagaagagtcagaatctgatagaccagtcaaacaagatattggatagcattgaaaaggggaatgcaggatttgtcatagtgatagtcctcattgtcctgctcatgctggcagcagttggtgtgggtgtcttctttgtggttaagaagagaaaagctgctcccaaattcccaatggaaatgaatggtgtgaacaacaaaggatttatcccttaattttagttattaaaaaaaaaaaaaaaaaaaaaaaaaaaa

SEQ ID NO: 4 - DNA, 1636 bp, rhinotracheitis virus
  CDS (13)...(1629): Turkey rhinotracheitis virus gene for fusion protein (F1 and F2 subunits), complete cds
gggacaagtaggatggatgtaagaatctgtctcctattgttccttatatctaatcctagtagctgcatacaagaaacatacaatgaagaatcctgcagtactgtaactagaggttataagagtgtgttaaggacagggtggtatacgaatgtatttaacctcgaaatagggaatgttgagaacatcacttgcaatgatggacccagcctaattgacactgagttagtactcacaaagaatgctttgagggagctcaaaacagtgtcagctgatcaagtggctaaggaaagcagactatcctcacccaggagacgtagatttgtactgggtgcaatagcacttggtgttgcgacagctgctgccgtaacagctggtgtagcacttgcaaagacaattagattagagggagaggtgaaggcaattaagaatgccctccggaacacaaatgaggcagtatccacattagggaatggtgtgagggtactagcaactgcagtcaatgacctcaaagaatttataagtaaaaaattgactcctgctattaaccagaacaaatgcaatatagcagatataaagatggcaattagttttggccaaaataacagaaggttcctgaatgtggtgaggcaattctctgatagtgcaggtatcacatcagctgtgtctcttgatttaatgacagatgatgaacttgttagagcaattaacagaatgccaacttcatcaggacagattagtttgatgttgaacaatcgtgccatggttagaaggaaggggtttggtatattgattggtgtttatgatggaacggtcgtttatatggtacaactgcccatattcggcgtgattgagacaccttgttggagggtggtggcagcaccactctgtaggaaagagaaaggcaattatgcttgtatactgagagaagatcaagggtggtactgtacaaatgctggctctacagcttattatcctaataaagatgattgtgaggtaagggatgattatgtattttgtgacacagcagctggcattaatgtggccctagaagttgaacagtgcaactataacatatcgacttctaaatacccatgcaaagtcagcacaggtagacaccctgtcagtatggtagccttaacccccctagggggtctagtgtcttgttatgagagtgtaagttgctccataggtagcaataaagtagggataataaaacagctaggcaaagggtgcacccacattcccaacaacgaagctgacacgataaccattgataacactgtgtaccaattgagcaaggttgtaggcgaacagaggaccataaaaggagctccagttgtgaacaattttaacccaatattattccctgaggatcagttcaatgttgcacttgaccaagtatttgagagtatagatagatctcaggacttaatagataagtctaacgacttgctaggtgcagatgccaagagcaaggctggaattgctatagcaatagtagtgctagtcattctaggaatcttctttttacttgcagtgatatattactgttccagagtccggaagaccaaaccaaagcatgattacccggccacgacaggtcatagcagcatggcttatgtcagttaagttattt

SEQ ID NO: 5 - DNA, 1860 bp, pneumovirus
  CDS (1)...(110): Avian pneumovirus matrix protein (M) gene, partial cds
  CDS (216)...(1829): Avian pneumovirus fusion glycoprotein (F) gene, complete cds
gagttcaggtaatagtggagttaggggcatacgttcaagcagaaagcataagcagaatctgcaggaactggagccaccagggtacgagatatgtcctgaagtcaagataaacacagagagtacacttaccaaatcacagtaacaatttcgtttttaaccctctcatagttattacctagcttgatattatttagaaaaaattgggacaagtgaaaatgtcttggaaagtggtactgctattggtattgctagctaccccaacgggggggctagaagaaagttatctagaggagtcatgcagtactgttactagaggatacctgagtgttttgaggacaggatggtatacaaatgtgttcacacttgaggttggagatgtggaaaatctcacatgtaccgacgggcccagcttaataagaacagaacttgaactgacaaaaaatgcacttgaggaactcaagacagtatcagcagatcaattggcaaaggaagctaggataatgtcaccaagaaaagcccggtttgttctgggtgccatagcattaggtgtggcaactgctgctgctgtgacggctggtgtagcgatagccaagacaattaggctagaaggagaagtggctgcaatcaagggtgcgctcaggaaaacaaatgaggctgtatctacattaggaaatggcgtgagggtacttgcaacagctgtgaatgatctcaaggactttataagtaaaaaattgacacctgcaataaacaggaacaagtgtgacatctcagaccttaagatggcagtgagctttggacaatacaatcggaggttcctcaatgtggtaagacagttttctgacaatgcaggtattacgcctgcaatatctctagatttaatgactgacgctgagcttgtaagagctgtaagcaacatgcccacatcttcaggacagatcaatctgatgcttgagaatcgggcaatggtcagaaggaaaggatttgggattttgattggagtttatggtagctctgtggtctatatagtgcagcttcctattttcggtgtgatagatacaccgtgttggaaggtgaaggctgctccattatgttcagggaaagacgggaattatgcatgtctcttgcgagaggaccaaggttggtattgtcaaaatgctggatccacagtttattatccaaatgaggaggactgtgaagtaagaagtgatcatgtgttttgtgacacagcagctgggataaatgtagcaaaggagtcagaagagtgcaacaggaatatctcaacaacaaagtacccttgcaaggtaagtacagggcgtcacccaataagcatggtggccttatcaccactgggtgctttggtagcctgttatgacggtatgagttgttccattggaagcaacaaggttggaataatcagacctttggggaaagggtgttcatacatcagcaatcaagatgctgacactgttacaattgacaacacagtgtaccaattgagcaaagttgaaggagaacaacacacaattaaagggaagccagtatctagcaattttgaccctatagagttccctgaagatcagttcaacatagccctggatcaggtgtttgaaagtgttgagaagagtcagaatctgatagaccagtcaaacaagatattggatagcattgaaaaggggaatgcaggatttgtcatagtgatagtcctcattgtcctgctcatgctggcagcagttggtgtgggtgtcttctttgtggttaagaagagaaaagctgctcccaaattcccaatggaaatgaatggtgtgaacaacaaaggatttatcccttaattttagttactaaaaaattgggacaagtgaa

SEQ ID NO: 6 - protein, 574 aa, paramyxovirus
MELLIHRLSAIFLTLAINALYLTSSQNITEEFYQSTCSAVSRGYFSALRTGWYTSVITIELSNIKETKCNGTDTKVKLIKQELDKYKNAVTELQLLMQNTPAANNRARREAPQYMNYTINTTKNLNVSISKKRKRRFLGFLLGVGSAIASGIAVSKVLHLEGEVNKIKNALLSTNKAVVSLSNGVSVLTSKVLDLKNYINNQLLPIVNQQSCRISNIETVIEFQQKNSRLLEINREFSVNAGVTTPLSTYMLTNSELLSLINDMPITNDQKKLMSSNVQIVRQQSYSIMSIIKEEVLAYVVQLPIYGVIDTPCWKLHTSPLCTTNIKEGSNICLTRTDRGWYCDNAGSVSFFPQADTCKVQSNRVFCDTMNSLTLPSEVSLCNTDIFNSKYDCKIMTSKTDISSSVITSLGAIVSCYGKTKCTASNKNRGIIKTFSNGCDYVSNKGVDTVSVGNTLYYVNKLEGKNLYVKGEPIINYYDPLVFPSDEFDASISQVNEKINQSLAFIRRSDELLHNVNTGKSTTNIMITTIIIVIIVVLLSLIAIGLLLYCKAKNTPVTLSKDQLSGINNIAFSK

SEQ ID NO: 7 - protein, 574 aa, paramyxovirus
MELLILKANAITTILTAVTFCFASGQNITEEFYQSTCSAVSKGYLSALRTGWYTSVITIELSNIKENKCNGTDAKVKLIKQELDKYKNAVTELQLLMQSTPPTNNRARRELPRFMNYTLNNAKKTNVTLSKKRKRRFLGFLLGVGSAIASGVAVSKVLHLEGEVNKIKSALLSTNKAVVSLSNGVSVLTSKVLDLKNYIDKQLLPIVNKQSCSISNIETVIEFQQKNNRLLEITREFSVNAGVTTPVSTYMLTNSELLSLINDMPITNDQKKLMSNNVQIVRQQSYSIMSIIKEEVLAYVVQLPLYGVIDTPCWKLHTSPLCTTNTKEGSNICLTRTDRGWYCDNAGSVSFFPQAETCKVQSNRVFCDTMNSLTLPSEINLCNVDIFNPKYDCKIMTSKTDVSSSVITSLGAIVSCYGKTKCTASNKNRGIIKTFSNGCDYVSNKGMDTVSVGNTLYYVNKQEGKSLYVKGEPIINFYDPLVFPSDEFDASISQVNEKINQSLAFIRKSDELLHNVNAGKSTTNIMITTIIIVIIVILLSLIAVGLLLYCKARSTPVTLSKDQLSGINNIAFSN

SEQ ID NO: 8 - protein, 121 aa, metapneumovirus
LLITPQHGLKESYLEESCSTITEGYLSVLRTGWYTNVFTLEVGDVENLTCADGPSLIKTELDLTKSALRELRTVSADQLAREEQIENPRQSRFVLGAIALGVATAAAVTAGVAIAKTIRLE

SEQ ID NO: 9 - protein, 539 aa, metapneumovirus
MSWKVVIIFSLLITPQHGLKESYLEESCSTITEGYLSVLRTGWYTNVFTLEVGDVENLTCADGPSLIKTELDLTKSALRELRTVSADQLAREEQIENPRQSRFVLGAIALGVATAAAVTAGVAIAKTIRLESEVTAIKNALKKTNEAVSTLGNGVRVLATAVRELKDFVSKNLTRAINKNKCDIADLKMAVSFSQFNRRFLNVVRQFSDNAGITPAISLDLMTDAELARAVSNMPTSAGQIKLMLENRAMVRRKGFGFLIGVYGSSVIYMVQLPIFGVIDTPCWIVKAAPSCSGKKGNYACLLREDQGWYCQNAGSTVYYPNEKDCETRGDHVFCDTAAGINVAEQSKECNINISTTNYPCKVSTGRHPISMVALSPLGALVACYKGVSCSIGSNRVGIIKQLNKGCSYITNQDADTVTIDNTVYQLSKVEGEQHVIKGRPVSSSFDPVKFPEDQFNVALDQVFESIENSQALVDQSNRILSSAEKGNTGFIIVIILIAVLGSTMILVSVFIIIKKTKRPTGAPPELSGVTNNGFIPHN

SEQ ID NO: 10 - protein, 532 aa, Avian pneumovirus
MSWKVVLLLVLLATPTGGLEESYLEESCSTVTRGYLSVLRTGWYTNVFTLGVGDVKNLTCTDGPSLIRTELELTKNALEELKTVSADQLAKEARIMSPRKARFVLGAIALGVATAAAVTAGVAIAKTIRLEGEVAAIKGALRKTNEAVSTLGNGVRVLATAVNDLKDFISKKLTPAINRNKCDISDLKMAVSFGQYNRRFLNVVRQFSDNAGITPAISLDLMTDAELVRAVSNMPTSSGQINLMLENRAMVRRKGFGILIGVYGSSVVYIVQLPIFGVIDTPCWRVKAAPLCSGKDGNYACLLREDQGWYCQNAGSTVYYPNEEDCEVRSDHVFCDTAAGINVAKESEECNRNISTTKYPCKVSTGRHPISMVALSPLGALVACYDGMSCSIGSNKVGIIRPLGKGCSYISNQDADTVTIDNTVYQLSKVEGEQHTIKGKPVSSNFDPIEFPEDQFNVALDQVFESVEKSQNLIDQSNKILDSIEKGNAGFVIVIVLIVLLMLAAVGVGVFFVVKKRKAAPKFPMEMNGVNN

SEQ ID NO: 11 - protein, 537 aa, Avian pneumovirus
MSWKVVLLLVLLATPTGGLEESYLEESCSTVTRGYLSVLRTGWYTNVFTLEVGDVENLTCTDGPSLIRTELELTKNALEELKTVSADQLAKEARIMSPRKARFVLGAIALGVATAAAVTAGVAIAKTIRLEGEVAAIKGALRKTNEAVSTLGNGVRVLATAVNDLKDFISKKLTPAINRNKCDISDLKMAVSFGQYNRRFLNVVRQFSDNAGITPAISLDLMTDAELVRAVSNMPTSSGQINLMLENRAMVRRKGFGILIGVYGSSVVYIVQLPIFGVIDTPCWKVKAAPLCSGKDGNYACLLREDQGWYCQNAGSTVYYPNEEDCEVRSDHVFCDTAAGINVAKESEECNRNISTTKYPCKVSTGRHPISMVALSPLGALVACYDGMSCSIGSNKVGIIRPLGKGCSYISNQDADTVTIDNTVYQLSKVEGEQHTIKGKPVSSNFDPIEFPEDQFNVALDQVFESVEKSQNLIDQSNKILDSIEKGNAGFVIVIVLIVLLMLAAVGVGVFFVVKKRKAAPKFPMEMNGVNNKGFIP

SEQ ID NO: 12 - protein, 538 aa, Turkey rhinotracheitis virus
MDVRICLLLFLISNPSSCIQETYNEESCSTVTRGYKSVLRTGWYTNVFNLEIGNVENITCNDGPSLIDTELVLTKNALRELKTVSADQVAKESRLSSPRRRRFVLGAIALGVATAAAVTAGVALAKTIRLEGEVKAIKNALRNTNEAVSTLGNGVRVLATAVNDLKEFISKKLTPAINQNKCNIADIKMAISFGQNNRRFLNVVRQFSDSAGITSAVSLDLMTDDELVRAINRMPTSSGQISLMLNNRAMVRRKGFGILIGVYDGTVVYMVQLPIFGVIETPCWRVVAAPLCRKEKGNYACILREDQGWYCTNAGSTAYYPNKDDCEVRDDYVFCDTAAGINVALEVEQCNYNISTSKYPCKVSTGRHPVSMVALTPLGGLVSCYESVSCSIGSNKVGIIKQLGKGCTHIPNNEADTITIDNTVYQLSKVVGEQRTIKGAPVVNNFNPILFPEDQFNVALDQVFESIDRSQDLIDKSNDLLGADAKSKAGIAIAIVVLVILGIFFLLAVIYYCSRVRKTKPKHDYPATTGHSSMAYVS

SEQ ID NO: 13 - protein, 537 aa, Avian penumovirus
MSWKVVLLLVLLATPTGGLEESYLEESCSTVTRGYLSVLRTGWYTNVFTLEVGDVENLTCTDGPSLIRTELELTKNALEELKTVSADQLAKEARIMSPRKARFVLGAIALGVATAAAVTAGVAIAKTIRLEGEVAAIKGALRKTNEAVSTLGNGVRVLATAVNDLKDFISKKLTPAINRNKCDISDLKMAVSFGQYNRRFLNVVRQFSDNAGITPAISLDLMTDAELVRAVSNMPTSSGQINLMLENRAMVRRKGFGILIGVYGSSVVYIVQLPIFGVIDTPCWKVKAAPLCSGKDGNYACLLREDQGWYCQNAGSTVYYPNEEDCEVRSDHVFCDTAAGINVAKESEECNRNISTTKYPCKVSTGRHPISMVALSPLGALVACYDGMSCSIGSNKVGIIRPLGKGCSYISNQDADTVTIDNTVYQLSKVEGEQHTIKGKPVSSNFDPIEFPEDQFNIALDQVFESVEKSQNLIDQSNKILDSIEKGNAGFVIVIVLIVLLMLAAVGVGVFFVVKKRKAAPKFPMEMNGVNNKGFIP

SEQ ID NO: 14 - DNA, 1193 bp, rhinotracheitis virus
  CDS (16)...(1191): Turkey rhinotracheitis virus (strain CVL14/1) attachment protien (G) mRNA, complete cds
gggacaagtatctctatggggtccaaactatatatggctcagggcaccagtgcatatcaaactgcagtggggttctggctggacatcgggaggaggtacatattggctatagtcctatcagctttcgggctgacctgcacagtcactattgcactcactgttagcgtcatagttgaacagtcagtgttagaggagtgcagaaactacaatggaggagatagagattggtggtcaaccacccaggagcagccaactactgcaccaagtgcgactccagcaggaaattatggaggattacaaacggctcgaacaagaaagtctgaaagctgtttgcatgtgcaaatttcttatggtgatatgtatagccgcagtgatactgtactgggtggttttgattgtatgggcttattggttctttgcaaatcaggaccaatttgtcagcgagataatcaagttgacccaacagccctctgccattgcagggtagatctttcaagtgtggactgctgcaaggtgaacaagattagcactaacagcagcaccacctctgagccccagaagaccaacccggcatggcctagccaagacaacacagactccgatccaaatccccaaggcataaccaccagcacagccactctgctctcaacaagtctgggcctcatgctcacatcgaagactgggacacacaaatcagggcccccccaagccttgccggggagcaacaccaacggaaaaacaaccacagaccgagaaccagggcccacaaaccaaccaaattcaaccaccaatgggcaacacaataaacacacccaacgaatgacacccccgccaagtcacgacaacacaagaaccatcctccagcacacaacaccctgggaaaagacattcagtacatacaagcccacacactctccgaccaacgaatcagatcaatccctccccacaactcaaaacagcatcaactgtgaacattttgacccccaaggcaaggaaaaaatctgctacagagtaggttcttacaactccaatattacaaagcaatgcagaattgatgtgcctttgtgttccacttatagcacagtgtgcatgaaaacatactataccgaaccattcaactgttggaggcgtatctggcgttgcttgtgtgatgacggagttggtctggttgagtggtgttgcactagttaact

SEQ ID NO: 15 - DNA, 1260 bp, rhinotracheitis virus
  CDS (16)...(1260): Turkey rhinotracheitis virus (strain 6574) attachment protein (G), complete cds
gggacaagtatccagatggggtcagagctctacatcatagagggggtgagctcatctgaaatagtcctcaagcaagtcctcagaaggagccaaaaaatactgttaggactggtgttatcagccttaggcttgacgctcactagcactattgttatatctatttgtattagtgtagaacaggtcaaattacgacagtgtgtggacacttattgggcggaaaatggatccttacatccaggacagtcaacagaaaatacttcaacaagaggtaagactacaacaaaagaccctagaagattacaggcgactggagcaggaaagtttgagagctgtgggtatgtgcaagttgttgatggtgatatgcatgatcgcagttatgctgtactgggtggtgttgattgtttgggcttattggctctttgtgaatcaggaccaatttgtcagggagatacttggtctgaagacggaaacttctgccgatgcactttttcttcccatggggtgagttgctgcaaaaaacccaaaagcaaggcaaccactgcccagaggaactccaaaccagctaacagcaaatcaactcctccggtacattcagacagggccagcaaagaacataatccctcccaaggggagcaaccccgcagggggccaaccagcagcaagacaactattgctagcaccccttcaacagaggacactgctaaaccaacgattagcaaacctaaactcaccatcaggccctcgcaaagaggtccatccggcagcacaaaagcagcctccagcacccccagccacaagaccaacaccagaggcaccagcaagacgaccgaccagagaccccgcaccggacccactcccgaaaggcccagacaaacccacagcacagcaactccgccccccacaaccccaatccacaagggccgggccccaacccccaaaccaacaacagacctcaaggtcaacccaagggaaggcagcacaagcccaactgcaatacagaaaaacccaaccacacaaagtaatcttgttgactgcacactgtctgatccagatgagccacaaaggatttgttaccaggtaggaacttacaatcctagtcaatcgggaacctgcaacatagaggttccaaaatgttccacttatgggcatgcttgtatggctacattatatgacaccccattcaactgctggcgcaggaccaggagatgcatctgtgattccggaggggagctgattgagtggtgctgtactagtcaataa

SEQ ID NO: 16 - protein, 391 aa, Turkey rhinotracheitis virus
MGSKLYMAQGTSAYQTAVGFWLDIGRRYILAIVLSAFGLTCTVTIALTVSVIVEQSVLEECRNYNGGDRDWWSTTQEQPTTAPSATPAGNYGGLQTARTRKSESCLHVQISYGDMYSRSDTVLGGFDCMGLLVLCKSGPICQRDNQVDPTALCHCRVDLSSVDCCKVNKISTNSSTTSEPQKTNPAWPSQDNTDSDPNPQGITTSTATLLSTSLGLMLTSKTGTHKSGPPQALPGSNTNGKTTTDREPGPTNQPNSTTNGQHNKHTQRMTPPPSHDNTRTILQHTTPWEKTFSTYKPTHSPTNESDQSLPTTQNSINCEHFDPQGKEKICYRVGSYNSNITKQCRIDVPLCSTYSTVCMKTYYTEPFNCWRRIWRCLCDDGVGLVEWCCTS

SEQ ID NO: 17 - protein, 414 aa, rhinotracheitis virus
MGSELYIIEGVSSSEIVLKQVLRRSQKILLGLVLSALGLTLTSTIVISICISVEQVKLRQCVDTYWAENGSLHPGQSTENTSTRGKTTTKDPRRLQATGAGKFESCGYVQVVDGDMHDRSYAVLGGVDCLGLLALCESGPICQGDTWSEDGNFCRCTFSSHGVSCCKKPKSKATTAQRNSKPANSKSTPPVHSDRASKEHNPSQGEQPRRGPTSSKTTIASTPSTEDTAKPTISKPKLTIRPSQRGPSGSTKAASSTPSHKTNTRGTSKTTDQRPRTGPTPERPRQTHSTATPPPTTPIHKGRAPTPKPTTDLKVNPREGSTSPTAIQKNPTTQSNLVDCTLSDPDEPQRICYQVGTYNPSQSGTCNIEVPKCSTYGHACMATLYDTPFNCWRRTRRCICDSGGELIEWCCTSQ

SEQ ID NO: 18 - protein, 539 aa, human Metapneumo virus
MSWKVVIIFSLLITPQHGLKESYLEESCSTITEGYLSVLRTGWYTNVFTLEVGDVENLTCADGPSLIKTELDLTKSALRELRTVSADQLAREEQIENPRQSRFVLGAIALGVATAAAVTAGVAIAKTIRLESEVTAIKNALKKTNEAVSTLGNGVRVLATAVRELKDFVSKNLTRAINKNKCDIADLKMAVSFSQFNRRFLNVVRQFSDNAGITPAISLDLMTDAELARAVSNMPTSAGQIKLMLENRAMVRRKGFGILIGVYGSSVIYMVQLPIFGVIDTPCWIVKAAPSCSGKKGNYACLLREDQGWYCQNAGSTVYYPNEKDCETRGDHVFCDTAAGINVAEQSKECNINISTTNYPCKVSTGRHPISMVALSPLGALVACYKGVSCSIGSNRVGIIKQLNKGCSYITNQDADTVTIDNTVYQLSKVEGEQHVIKGRPVSSSFDPVKFPEDQFNVALDQVFESIENSQALVDQSNRILSSAEKGNTGFIIVIILIAVLGSTMILVSVFIIIKKTKKPTGAPPELSGVTNNGFIPHN

SEQ ID NO: 19 - protein, 539 aa, human Metapneumo virus
MSWKVVIIFSLLITPQHGLKESYLEESCSTITEGYLSVLRTGWYTNVFTLEVGDVENLTCSDGPSLIKTELDLTKSALRELKTVSADQLAREEQIENPRQSRFVLGAIALGVATAAAVTAGVAIAKTIRLESEVTAIKNALKTTNEAVSTLGNGVRVLATAVRELKDFVSKNLTRAINKNKCDIDDLKMAVSFSQFNRRFLNVVRQFSDNAGITPAISLDLMTDAELARAVSNMPTSAGQIKLMLENRAMVRRKGFGILIGVYGSSVIYTVQLPIFGVIDTPCWIVKAAPSCSEKKGNYACLLREDQGWYCQNAGSTVYYPNEKDCETRGDHVFCDTAAGINVAEQSKECNINISTTNYPCKVSTGRHPISMVALSPLGALVACYKGVSCSIGSNRVGIIKQLNKGCSYITNQDADTVTIDNTVYQLSKVEGEQHVIKGRPVSSSFDPIKFPEDQFNVALDQVFENIENSQALVDQSNRILSSAEKGNTGFIIVIILIAVLGSSMILVSIFIIIKKTKKPTGAPPELSGVTNNGFIPHS

SEQ ID NO: 20 - protein, 539 aa, human Metapneumo virus
MSWKVMIIISLLITPQHGLKESYLEESCSTITEGYLSVLRTGWYTNVFTLEVGDVENLTCTDGPSLIKTELDLTKSALRELKTVSADQLAREEQIENPRQSRFVLGAIALGVATAAAVTAGIAIAKTIRLESEVNAIKGALKQTNEAVSTLGNGVRVLATAVRELKEFVSKNLTSAINRNKCDIADLKMAVSFSQFNRRFLNVVRQFSDNAGITPAISLDLMTDAELARAVSYMPTSAGQIKLMLENRAMVRRKGFGILIGVYGSSVIYMVQLPIFGVIDTPCWIIKAAPSCSEKNGNYACLLREDQGWYCKNAGSTVYYPNEKDCETRGDHVFCDTAAGINVAEQSRECNINISTTNYPCKVSTGRHPISMVALSPLGALVACYKGVSCSIGSNWVGIIKQLPKGCSYITNQDADTVTIDNTVYQLSKVEGEQHVIKGRPVSSSFDPIKFPEDQFNVALDQVFESIENSQALVDQSNKILNSAEKGNTGFIIVVILVAVLGLTMISVSIIIIIKKTRKPTGAPPELNGVTNGGFIPHS

SEQ ID NO: 21 - protein, 539 aa, human Metapneumo virus
MSWKVMIIISLLITPQHGLKESYLEESCSTITEGYLSVLRTGWYTNVFTLEVGDVENLTCTDGPSLIKTELDLTKSALRELKTVSADQLAREEQIENPRQSRFVLGAIALGVATAAAVTAGIAIAKTIRLESEVNAIKGALKTTNEAVSTLGNGVRVLATAVRELKEFVSKNLTSAINKNKCDIADLKMAVSFSQFNRRFLNVVRQFSDNAGITPAISLDLMTDAELARAVSYMPTSAGQIKLMLENRAMVRRKGFGILIGVYGSSVIYMVQLPIFGVIDTPCWIIKAAPSCSEKDGNYACLLREDQGWYCKNAGSTVYYPNEKDCETRGDHVFCDTAAGINVAEQSRECNINISTTNYPCKVSTGRHPISMVALSPLGALVACYKGVSCSIGSNRVGIIKQLPKGCSYITNQDADTVTIDNTVYQLSKVEGEQHVIKGRPVSSSFDPIRFPEDQFNVALDQVFESIENSQALVDQSNKILNSAEKGNTGFIIVIILIAVLGLTMISVSIIIIIKKTRKPTGAPPELNGVTNGGFIPHS

SEQ ID NO: 22 - DNA, 1620 bp, human Metapneumo virus
atgtcttggaaagtggtgatcattttttcattgttaataacacctcaacacggtcttaaagagagctacttagaagagtcatgtagcactataactgaaggatatctcagtgttctgaggacaggttggtacaccaatgtttttacactggaggtaggcgatgtagagaaccttacatgtgccgatggacccagcttaataaaaacagaattagacctgaccaaaagtgcactaagagagctcagaacagtttctgctgatcaactggcaagagaggagcaaattgaaaatcccagacaatctagattcgttctaggagcaatagcactcggtgttgcaactgcagctgcagttacagcaggtgttgcaattgccaaaaccatccggcttgaaagtgaagtaacagcaattaagaatgccctcaaaaagaccaatgaagcagtatctacattggggaatggagttcgtgtgttggcaactgcagtgagagagctgaaagattttgtgagcaagaatctaacacgtgcaatcaacaaaaacaagtgcgacattgctgacctgaaaatggccgttagcttcagtcaattcaacagaaggttcctaaatgttgtgcggcaattttcagacaacgctggaataacaccagcaatatctttggacttaatgacagatgctgaactagccagagctgtttccaacatgccaacatctgcaggacaaataaaactgatgttggagaaccgtgcaatggtaagaagaaaagggttcggaatcctgataggagtttacggaagctccgtaatttacatggtgcaactgccaatctttggggttatagacacgccttgctggatagtaaaagcagccccttcttgttcaggaaaaaagggaaactatgcttgcctcttaagagaagaccaaggatggtattgtcaaaatgcagggtcaactgtttactacccaaatgaaaaagactgtgaaacaagaggagaccatgtcttttgcgacacagcagcaggaatcaatgttgctgagcagtcaaaggagtgcaacataaacatatctactactaattacccatgcaaagttagcacaggaagacatcctatcagtatggttgcactatctcctcttggggctttggttgcttgctacaagggagtgagctgttccattggcagcaacagagtagggatcatcaagcaactgaacaaaggctgctcttatataaccaaccaagacgcagacacagtgacaatagacaacactgtataccagctaagcaaagttgaaggcgaacagcatgttataaaaggaaggccagtgtcaagcagctttgacccagtcaagtttcctgaagatcaattcaatgttgcacttgaccaagttttcgagagcattgagaacagtcaggccttggtggatcaatcaaacagaatcctaagcagtgcagagaaaggaaacactggcttcatcattgtaataattctaattgctgtccttggctctaccatgatcctagtgagtgtttttatcataataaagaaaacaaagaaacccacaggagcacctccagagctgagtggtgtcacaaacaatggcttcataccacataattag

SEQ ID NO: 23 - DNA, 1620 bp, human Metapneumo virus
atgtcttggaaagtggtgatcattttttcattgctaataacacctcaacacggtcttaaagagagctacctagaagaatcatgtagcactataactgagggatatcttagtgttctgaggacaggttggtataccaacgtttttacattagaggtgggtgatgtagaaaaccttacatgttctgatggacctagcctaataaaaacagaattagatctgaccaaaagtgcactaagagagctcaaaacagtctctgctgaccaattggcaagagaggaacaaattgagaatcccagacaatctaggtttgttctaggagcaatagcactcggtgttgcaacagcagctgcagtcacagcaggtgttgcaattgccaaaaccatccggcttgagagtgaagtcacagcaattaagaatgccctcaaaacgaccaatgaagcagtatctacattggggaatggagttcgagtgttggcaactgcagtgagagagctaaaagactttgtgagcaagaatttaactcgtgcaatcaacaaaaacaagtgcgacattgatgacctaaaaatggctgttagcttcagtcaattcaacagaaggtttctaaatgttgtgcggcaattttcagacaatgctggaataacaccagcaatatctttggacttaatgacagatgctgaactagccagggccgtttctaacatgccgacatctgcaggacaaataaaattgatgttggagaaccgtgcgatggtgcgaagaaaggggttcggaatcctgataggggtctacgggagctccgtaatttacacggtgcagctgccaatctttggcgttatagacacgccttgctggatagtaaaagcagccccttcttgttccgaaaaaaagggaaactatgcttgcctcttaagagaagaccaagggtggtattgtcagaatgcagggtcaactgtttactacccaaatgagaaagactgtgaaacaagaggagaccatgtcttttgcgacacagcagcaggaattaatgttgctgagcaatcaaaggagtgcaacatcaacatatccactacaaattacccatgcaaagtcagcacaggaagacatcctatcagtatggttgcactgtctcctcttggggctctggttgcttgctacaaaggagtaagctgttccattggcagcaacagagtagggatcatcaagcagctgaacaaaggttgctcctatataaccaaccaagatgcagacacagtgacaatagacaacactgtatatcagctaagcaaagttgagggtgaacagcatgttataaaaggcagaccagtgtcaagcagctttgatccaatcaagtttcctgaagatcaattcaatgttgcacttgaccaagtttttgagaacattgaaaacagccaggccttagtagatcaatcaaacagaatcctaagcagtgcagagaaagggaatactggctttatcattgtaataattctaattgctgtccttggctctagcatgatcctagtgagcatcttcattataatcaagaaaacaaagaaaccaacgggagcacctccagagctgagtggtgtcacaaacaatggcttcataccacacagttag

SEQ ID NO: 24 - DNA, 1620 bp, human Metapneumo virus
atgtcttggaaagtgatgatcatcatttcgttactcataacaccccagcacgggctaaaggagagttatttggaagaatcatgtagtactataactgagggatacctcagtgttttaagaacaggctggtacactaatgtcttcacattagaagttggtgatgttgaaaatcttacatgtactgatggacctagcttaatcaaaacagaacttgatctaacaaaaagtgctttaagggaactcaaaacagtctctgctgatcagttggcgagagaggagcaaattgaaaatcccagacaatcaagatttgtcttaggtgcgatagctctcggagttgctacagcagcagcagtcacagcaggcattgcaatagccaaaaccataaggcttgagagtgaggtgaatgcaattaaaggtgctctcaaacaaactaatgaagcagtatccacattagggaatggtgtgcgggtcctagccactgcagtgagagagctaaaagaatttgtgagcaaaaacctgactagtgcaatcaacaggaacaaatgtgacattgctgatctgaagatggctgtcagcttcagtcaattcaacagaagatttctaaatgttgtgcggcagttttcagacaatgcagggataacaccagcaatatcattggacctgatgactgatgctgagttggccagagctgtatcatacatgccaacatctgcagggcagataaaactgatgttggagaaccgcgcaatggtaaggagaaaaggatttggaatcctgataggggtctacggaagctctgtgatttacatggttcaattgccgatctttggtgtcatagatacaccttgttggatcatcaaggcagctccctcttgctcagaaaaaaacgggaattatgcttgcctcctaagagaggatcaagggtggtattgtaaaaatgcaggatctactgtttactacccaaatgaaaaagactgcgaaacaagaggtgatcatgttttttgtgacacagcagcagggatcaatgttgctgagcaatcaagagaatgcaacatcaacatatctactaccaactacccatgcaaagtcagcacaggaagacaccctataagcatggttgcactatcacctctcggtgctttggtggcttgctataaaggggtaagctgctcgattggcagcaattgggttggaatcatcaaacaattacccaaaggctgctcatacataaccaaccaggatgcagacactgtaacaattgacaataccgtgtatcaactaagcaaagttgaaggtgaacagcatgtaataaaagggagaccagtttcaagcagttttgatccaatcaagtttcctgaggatcagttcaatgttgcgcttgatcaagtcttcgaaagcattgagaacagtcaggcactagtggaccagtcaaacaaaattctaaacagtgcagaaaaaggaaacactggtttcattatcgtagtaattttggttgctgttcttggtctaaccatgatttcagtgagcatcatcatcataatcaagaaaacaaggaagcccacaggagcacctccagagctgaatggtgtcaccaacggcggtttcataccacatagttag

SEQ ID NO: 25 - DNA, 1620 bp, human Metapneumo virus
atgtcttggaaagtgatgattatcatttcgttactcataacacctcagcacggactaaaagaaagttatttagaagaatcatgtagtactataactgaaggatatctcagtgttttaagaacaggttggtacaccaatgtctttacattagaagttggtgatgttgaaaatcttacatgtactgatggacctagcttaatcaaaacagaacttgacctaaccaaaagtgctctgagagaactcaaaacagtttctgctgatcagttagcgagagaagaacaaattgaaaatcccagacaatcaaggtttgtcctaggtgcaatagctcttggagttgccacagcagcagcagtcacagcaggcattgcaatagccaaaaccataagacttgagagtgaagtgaatgcaatcaaaggtgctctcaaaacaaccaacgaggcagtatccacactaggaaatggagtgcgagtcctagccactgcagtaagagagctgaaagaatttgtgagcaaaaacctgactagtgcgatcaacaagaacaaatgtgacattgctgatctgaagatggctgtcagcttcagtcaattcaacagaagattcctaaatgttgtgcggcagttttcagacaatgcagggataacaccagcaatatcattggacctaatgactgatgctgagctggccagagctgtatcatacatgccaacatctgcaggacagataaaactaatgttagagaaccgtgcaatggtgaggagaaaaggatttggaatcttgataggggtctacggaagctctgtgatttacatggtccagctgccgatctttggtgtcatagatacaccttgttggataatcaaggcagctccctcttgttcagaaaaagatggaaattatgcttgcctcctaagagaggatcaagggtggtattgcaaaaatgcaggatccactgtttactacccaaatgaaaaagactgcgaaacaagaggtgatcatgttttttgtgacacagcagcagggatcaatgttgctgagcaatcaagagaatgcaacatcaacatatctaccaccaactacccatgcaaagtcagcacaggaagacaccctatcagcatggttgcactatcacctctcggtgctttggtagcttgctacaagggggttagctgctcgattggcagtaatcgggttggaataatcaaacaactacctaaaggctgctcatacataactaaccaggacgcagacactgtaacaattgacaacactgtgtatcaactaagcaaagttgagggtgaacagcatgtaataaaagggagaccagtttcaagcagttttgatccaatcaggtttcctgaggatcagttcaatgttgcgcttgatcaagtctttgaaagcattgaaaacagtcaagcactagtggaccagtcaaacaaaattctgaacagtgcagaaaaaggaaacactggtttcattattgtaataattttgattgctgttcttgggttaaccatgatttcagtgagcatcatcatcataatcaaaaaaacaaggaagcccacaggggcacctccagagctgaatggtgttaccaacggcggttttataccgcatagttag

SEQ ID NO: 26 - protein, 236 aa, human Metapneumo virus
MEVKVENIRTIDMLKARVKNRVARSKCFKNASLVLIGITTLSIALNIYLIINYKMQKNTSESEHHTSSSPMESSRETPTVPTDNSDTNSSPQHPTQQSTEGSTLYFAASASSPETEPTSTPDTTNRPPFVDTHTTPPSASRTKTSPAVHTKNNPRTSSRTHSPPRATTRTARRTTTLRTSSTRKRPSTASVQPDISATTHKNEEASPASPQTSASTTRIQRKSVEANTSTTYNQTS

SEQ ID NO: 27 - protein, 219 aa, human Metapneumo virus
MEVKVENIRAIDMLKARVKNRVARSKCFKNASLILIGITTLSIALNIYLIINYTIQKTTSESEHHTSSPPTEPNKEASTISTDNPDINPSSQHPTQQSTENPTLNPAASASPSETEPASTPDTTNRLSSVDRSTAQPSESRTKTKPTVHTINNPNTASSTQSPPRTTTKAIRRATTFRMSSTGKRPTTTLVQSDSSTTTQNHEETGSANPQASASTMQN

SEQ ID NO: 28 - protein, 224 aa, human Metapneumo virus
MEVRVENIRAIDMFKAKIKNRIRSSRCYRNATLILIGLTALSMALNIFLIIDHATLRNMIKTENCANMPSAEPSKKTPMTSTAGPNTKPNPQQATQWTTENSTSPVATPEGHPYTGTTQTSDTTAPQQTTDKHTAPLKSTNEQITQTTTEKKTIRATTQKREKGKENTNQTTSTAATQTTNTTNQIRNASETITTSDRPRTDTTTQSSEQTTRATDPSSPPHHA

SEQ ID NO: 29 - protein, 236 aa, human Metapneumo virus
MEVRVENIRAIDMFKAKMKNRIRSSKCYRNATLILIGLTALSMALNIFLIIDYAMLKNMTKVEHCVNMPPVEPSKKTPMTSAVDLNTKPNPQQATQLAAEDSTSLAATSEDHLHTGTTPTPDATVSQQTTDEYTTLLRSTNRQTTQTTTEKKPTGATTKKETTTRTTSTAATQTLNTTNQTSYVREATTTSARSRNSATTQSSDQTTQAADPSSQPHHTQKSTTTTYNTDTSSPSS

SEQ ID NO: 30 - DNA, 708 bp, human Metapneumo virus
gaggtgaaagtggagaacattcgaacaatagatatgctcaaagcaagagtaaaaaatcgtgtggcacgcagcaaatgctttaaaaatgcctctttggtcctcataggaataactacattgagtattgccctcaatatctatctgatcataaactataaaatgcaaaaaaacacatctgaatcagaacatcacaccagctcatcacccatggaatccagcagagaaactccaacggtccccacagacaactcagacaccaactcaagcccacagcatccaactcaacagtccacagaaggctccacactctactttgcagcctcagcaagctcaccagagacagaaccaacatcaacaccagatacaacaaaccgcccgcccttcgtcgacacacacacaacaccaccaagcgcaagcagaacaaagacaagtccggcagtccacacaaaaaacaacccaaggacaagctctagaacacattctccaccacgggcaacgacaaggacggcacgcagaaccaccactctccgcacaagcagcacaagaaagagaccgtccacagcatcagtccaacctgacatcagcgcaacaacccacaaaaacgaagaagcaagtccagcgagcccacaaacatctgcaagcacaacaagaatacaaaggaaaagcgtggaggccaacacatcaacaacatacaaccaaactagttaa

SEQ ID NO: 31 - DNA, 660 bp, human Metapneumo virus
atggaggtgaaagtagagaacattcgagcaatagacatgctcaaagcaagagtgaaaaatcgtgtggcacgtagcaaatgctttaaaaatgcttctttaatcctcataggaataactacactgagtatagctctcaatatctatctgatcataaactacacaatacaaaaaaccacatccgaatcagaacaccacaccagctcaccacccacagaacccaacaaggaagcttcaacaatctccacagacaacccagacatcaatccaagctcacagcatccaactcaacagtccacagaaaaccccacactcaaccccgcagcatcagcgagcccatcagaaacagaaccagcatcaacaccagacacaacaaaccgcctgtcctccgtagacaggtccacagcacaaccaagtgaaagcagaacaaagacaaaaccgacagtccacacaatcaacaacccaaacacagcttccagtacacaatccccaccacggacaacaacgaaggcaatccgcagagccaccactttccgcatgagcagcacaggaaaaagaccaaccacaacattagtccagtccgacagcagcaccacaacccaaaatcatgaagaaacaggttcagcgaacccacaggcgtctgcaagcacaatgcaaaactag

SEQ ID NO: 32 - DNA, 675 bp, human Metapneumo virus
atggaagtaagagtggagaacattcgagcgatagacatgttcaaagcaaagataaaaaaccgtataagaagcagcaggtgctatagaaatgctacactgatccttattggactaacagcgttaagcatggcacttaatattttcctgatcatcgatcatgcaacattaagaaacatgatcaaaacagaaaactgtgctaacatgccgtcggcagaaccaagcaaaaagaccccaatgacctccacagcaggcccaaacaccaaacccaatccacagcaagcaacacagtggaccacagagaactcaacatccccagtagcaaccccagagggccatccatacacagggacaactcaaacatcagacacaacagctccccagcaaaccacagacaaacacacagcaccgctaaaatcaaccaatgaacagatcacccagacaaccacagagaaaaagacaatcagagcaacaacccaaaaaagggaaaaaggaaaagaaaacacaaaccaaaccacaagcacagctgcaacccaaacaaccaacaccaccaaccaaatcagaaatgcaagtgagacaatcacaacatccgacagacccagaactgacaccacaacccaaagcagcgaacagacaacccgggcaacagacccaagctccccaccacaccatgcatag

SEQ ID NO: 33 - DNA, 711 bp, human Metapneumo virus
atggaagtaagagtggagaacattcgggcaatagacatgttcaaagcaaaaatgaaaaaccgtataagaagtagcaagtgctatagaaatgctacactgatccttattggattaacagcattaagtatggcacttaatatttttttaatcattgattatgcaatgttaaaaaacatgaccaaagtggaacactgtgttaatatgccgccggtagaaccaagcaagaagaccccaatgacctctgcagtagacttaaacaccaaacccaatccacagcaggcaacacagttggccgcagaggattcaacatctctagcagcaacctcagaggaccatctacacacagggacaactccaacaccagatgcaacagtctctcagcaaaccacagacgagtacacaacattgctgagatcaaccaacagacagaccacccaaacaaccacagagaaaaagccaaccggagcaacaaccaaaaaagaaaccacaactcgaactacaagcacagctgcaacccaaacactcaacactaccaaccaaactagctatgtgagagaggcaaccacaacatccgccagatccagaaacagtgccacaactcaaagcagcgaccaaacaacccaggcagcagacccaagctcccaaccacaccatacacagaaaagcacaacaacaacatacaacacagacacatcctctccaagtagttaa

SEQ ID NO: 34 - protein, 2005 aa, human Metapneumo virus
MDPLNESTVNVYLPDSYLKGVISFSETNAIGSCLLKRPYLKNDNTAKVAIENPVIEHVRLKNAVNSKMKISDYKIVEPVNMQHEIMKNVHSCELTLLKQFLTRSKNISTLKLNMICDWLQLKSTSDDTSILSFIDVEFIPSWVSNWFSNWYNLNKLILEFRKEEVIRTGSILCRSLGKLVFVVSSYGCIVKSNKSKRVSFFTYNQLLTWKDVMLSRFNANFCIWVSNSLNENQEGLGLRSNLQGILTNKLYETVDYMLSLCCNEGFSLVKEFEGFIMSEILRITEHAQFSTRFRNTLLNGLTDQLTKLKNKNRLRVHGTVLENNDYPMYEVVLKLLGDTLRCIKLLINKNLENAAELYYIFRIFGHPMVDERDAMDAVKLNNEITKILRWESLTELRGAFILRIIKGFVDNNKRWPKIKNLKVLSKRWTMYFKAKSYPSQLELSEQDFLELAAIQFEQEFSVPEKTNLEMVLNDKAISPPKRLIWSVYPKNYLPEKIKNRYLEETFNASDSLKTRRVLEYYLKDNKFDQKELKSYVVKQEYLNDKDHIVSLTGKERELSVGRMFAMQPGKQRQIQILAEKLLADNIVPFFPETLTKYGDLDLQRIMEIKSELSSIKTRRNDSYNNYIARASIVTDLSKFNQAFRYETTAICADVADELHGTQSLFCWLHLIVPMTTMICAYRHAPPETKGEYDIDKIEEQSGLYRYHMGGIEGWCQKLWTMEAISLLDVVSVKTRCQMTSLLNGDNQSIDVSKPVKLSEGLDEVKADYSLAVKMLKEIRDAYRNIGHKLKEGETYISRDLQFISKVIQSEGVMHPTPIKKILRVGPWINTILDDIKTSAESIGSLCQELEFRGESIIVSLILRNFWLYNLYMHESKQHPLAGKQLFKQLNKTLTSVQRFFEIKKENEVVDLWMNIPMQFGGGDPVVFYRSFYRRTPDFLTEAISHVDILLRISANIRNEAKISFFKALLSIEKNERATLTTLMRDPQAVGSERQAKVTSDINRTAVTSILSLSPNQLFSDSAIHYSRNEEEVGIIADNITPVYPHGLRVLYESLPFHKAEKVVNMISGTKSITNLLQRTSAINGEDIDRAVSMMLENLGLLSRILSVVVDSIEIPTKSNGRLICCQISRTLRETSWNNMEIVGVTSPSITTCMDVIYATSSHLKGIIIEKFSTDRTTRGQRGPKSPWVGSSTQEKKLVPVYNRQILSKQQREQLEAIGKMRWVYKGTPGLRRLLNKICLGSLGISYKCVKPLLPRFMSVNFLHRLSVSSRPMEFPASVPAYRTTNYHFDTSPINQALSERFGNEDINLVFQNAISCGISIMSVVEQLTGRSPKQLVLIPQLEEIDIMPPPVFQGKFNYKLVDKITSDQHIFSPDKIDMLTLGKMLMPTIKGQKTDQFLNKRENYFHGNNLIESLSAALACHWCGILTEQCIENNIFKKDWGDGFISDHAFMDFKIFLCVFKTKLLCSWGSQGKNIKDEDIVDESIDKLLRIDNTFWRMFSKVMFESKVKKRIMLYDVKFLSLVGYIGFKNWFIEQLRSAELHEVPWIVNAEGDLVEIKSIKIYLQLIEQSLFLRITVLNYTDMAHALTRLIRKKLMCDNALLTPIPSPMVNLTQVIDPTEQLAYFPKITFERLKNYDTSSNYAKGKLTRNYMILLPWQHVNRYNFVFSSTGCKVSLKTCIGKLMKDLNPKVLYFIGEGAGNWMARTACEYPDIKFVYRSLKDDLDHHYPLEYQRVIGELSRIIDSGEGLSMETTDATQKTHWDLIHRVSKDALLITLCDAEFKDRDDFFKMVILWRKHVLSCRICTTYGTDLYLFAKYHAKDCNVKLPFFVRSVATFIMQGSKLSGSECYILLTLGHHNNLPCHGEIQNSKMKIAVCNDFYAAKKLDNKSIEANCKSLLSGLRIPINKKELNRQRRLLTLQSNHSSVATVGGSKVIESKWLTNKANTIIDWLEHILNSPKGELNYDFFEALENTYPNMIKLIDNLGNAEIKKLIKVTGYMLVSKK

SEQ ID NO: 35 - protein, 2005 aa, human Metapneumo virus
MDPLNESTVNVYLPDSYLKGVISFSETNAIGSCLLKRPYLKNDNTAKVAIENPVIEHVRLKNAVNSKMKISDYKVVEPVNMQHEIMKNVHSCELTLLKQFLTRSKNISTLKLNMICDWLQLKSTSDDTSILSFIDVEFIPSWVSNWFSNWYNLNKLILEFRREEVIRTGSILCRSLGKLVFIVSSYGCIVKSNKSKRVSFFTYNQLLTWKDVMLSRFNANFCIWVSNSLNENQEGLGLRSNLQGMLTNKLYETVDYMLSLCCNEGFSLVKEFEGFIMSEILRITEHAQFSTRFRNTLLNGLTDQLTKLKNKNRLRVHGTVLENNDYPMYEVVLKLLGDTLRCIKLLINKNLENAAELYYIFRIFGHPMVDERDAMDAVKLNNEITKILRLESLTELRGAFILRIIKGFVDNNKRWPKIKNLIVLSKRWTMYFKAKNYPSQLELSEQDFLELAAIQFEQEFSVPEKTNLEMVLNDKAISPPKRLIWSVYPKNYLPETIKNRYLEETFNASDSLKTRRVLEYYLKDNKFDQKELKSYVVRQEYLNDKEHIVSLTGKERELSVGRMFAMQPGKQRQIQILAEKLLADNIVPFFPETLTKYGDLDLQRIMEIKSELSSIKTRRNDSYNNYIARASIVTDLSKFNQAFRYETTAICADVADELHGTQSLFCWLHLIVPMTTMICAYRHAPPETKGEYDIDKIEEQSGLYRYHMGGIEGWCQKLWTMEAISLLDVVSVKTRCQMTSLLNGDNQSIDVSKPVKLSEGLDEVKADYRLAIKMLKEIRDAYRNIGHKLKEGETYISRDLQFISKVIQSEGVMHPTPIKKVLRVGPWINTILDDIKTSAESIGSLCQELEFRGESIIVSLILRNFWLYNLYMHESKQHPLAGKQLFKQLNKTLTSVQRFFEIKKENEVVDLWMNIPMQFGGGDPVVFYRSFYRRTPDFLTEAISHVDILLKISANIKNETKVSFFKALLSIEKNERATLTTLMRDPQAVGSERQAKVTSDINRTAVTSILSLSPNQLFSDSAIHYSRNEEEVGIIAENITPVYPHGLRVLYESLPFHKAEKVVNMISGTKSITNLLQRTSAINGEDIDRAVSMMLENLGLLSRILSVVVDSIEIPIKSNGRLICCQISRTLRETSWNNMEIVGVTSPSITTCMDVIYATSSHLKGIIIEKFSTDRTTRGQRGPKSPWVGSSTQEKKLVPVYNRQILSKQQREQLEAIGKMRWVYKGTPGLRRLLNKICLGSLGISYKCVKPLLPRFMSVNFLHRLSVSSRPMEFPASVPAYRTTNYHFDTSPINQALSERFGNEDINLVFQNAISCGISIMSVVEQLTGRSPKQLVLIPQLEEIDIMPPPVFQGKFNYKLVDKITSDQHIFSPDKIDMLTLGKMLMPTIKGQKTDQFLNKRENYFHGNNLIESLSAALACHWCGILTEQCIENNIFKKDWGDGFISDHAFMDFKIFLCVFKTKLLCSWGSQGKNIKDEDIVDESIDKLLRIDNTFWRMFSKVMFEPKVKKRIMLYDVKFLSLVGYIGFKNWFIEQLRSAELHEIPWIVNAEGDLVEIKSIKIYLQLIEQSLFLRITVLNYTDMAHALTRLIRKKLMCDNALLTPISSPMVNLTQVIDPTTQLDYFPKITFERLKNYDTSSNYAKGKLTRNYMILLPWQHVNRYNFVFSSTGCKVSLKTCIGKLMKDLNPKVLYFIGEGAGNWMARTACEYPDIKFVYRSLKDDLDHHYPLEYQRVIGELSRIIDSGEGLSMETTDATQKTHWDLIHRVSKDALLITLCDAEFKDRDDFFKMVILWRKHVLSCRICTTYGTDLYLFAKYHAKDCNVKLPFFVRSVATFIMQGSKLSGSECYILLTLGHHNSLPCHGEIQNSKMKIAVCNDFYAAKKLDNKSIEANCKSLLSGLRIPINKKELDRQRRLLTLQSNHSSVATVGGSKIIESKWLTNKASTIIDWLEHILNSPKGELNYDFFEALENTYPNMIKLIDNLGNAEIKKLIKVTGYMLVSKK

SEQ ID NO: 36 - protein, 2005 aa, human Metapneumo virus
MDPFCESTVNVYLPDSYLKGVISFSETNAIGSCLLKRPYLKNDNTAKVAVENPVVEHVRLRNAVMTKMKISDYKVVEPVNMQHEIMKNIHSCELTLLKQFLTRSKNISSLKLNMICDWLQLKSTSDNTSILNFIDVEFIPVWVSNWFSNWYNLNKLILEFRREEVIRTGSILCRSLGKLVFIVSSYGCVVKSNKSKRVSFFTYNQLLTWKDVMLSRFNANFCIWVSNNLNKNQEGLGLRSNLQGMLTNKLYETVDYMLSLCCNEGFSLVKEFEGFIMSEILKITEHAQFSTRFRNTLLNGLTEQLSVLKAKNRSRVLGTILENNNYPMYEVVLKLLGDTLKSIKLLINKNLENAAELYYIFRIFGHPMVDEREAMDAVKLNNEITKILKLESLTELRGAFILRIIKGFVDNNKRWPKIKNLKVLSKRWAMYFKAKSYPSQLELSVQDFLELAAVQFEQEFSVPEKTNLEMVLNDKAISPPKKLIWSVYPKNYLPETIKNQYLEEAFNASDSQRTRRVLEFYLKDCKFDQKELKRYVIKQEYLNDKDHIVSLTGKERELSVGRMFAMQPGKQRQIQILAEKLLADNIVPFFPETLTKYGDLDLQRIMEIKSELSSIKTRKNDSYNNYIARASIVTDLSKFNQAFRYETTAICADVADELHGTQSLFCWLHLIVPMTTMICAYRHAPPETKGEYDIDKIQEQSGLYRYHMGGIEGWCQKLWTMEAISLLDVVSVKTRCQMTSLLNGDNQSIDVSKPVKLSEGIDEVKADYSLAIRMLKEIRDAYKNIGHKLKEGETYISRDLQFISKVIQSEGVMHPTPIKKILRVGPWINTILDDIKTSAESIGSLCQELEFRGESILVSLILRNFWLYNLYMYESKQHPLAGKQLFKQLNKTLTSVQRFFELKKENDVVDLWMNIPMQFGGGDPVVFYRSFYRRTPDFLTEAISHVDLLLKVSNNIKDETKIRFFKALLSIEKNERATLTTLMRDPQAVGSERQAKVTSDINRTAVTSILSLSPNQLFCDSAIHYSRNEEEVGIIADNITPVYPHGLRVLYESLPFHKAEKVVNMISGTKSITNLLQRTSAINGEDIDRAVSMMLENLGLLSRILSVIINSIEIPIKSNGRLICCQISKTLREKSWNNMEIVGVTSPSIVTCMDVVYATSSHLKGIIIEKFSTDKTTRGQRGPKSPWVGSSTQEKKLVPVYNRQILSKQQKEQLEAIGKMRWVYKGTPGLRRLLNKICIGSLGISYKCVKPLLPRFMSVNFLHRLSVSSRPMEFPASVPAYRTTNYHFDTSPINQALSERFGNEDINLVFQNAISCGISIMSVVEQLTGRSPKQLVLIPQLEEIDIMPPPVFQGKFNYKLVDKITSDQHIFSPDKIDILTLGKMLMPTIKGQKTDQFLNKRENYFHGNNLIESLSAALACHWCGILTEQCIENNIFRKDWGDGFISDHAFMDFKVFLCVFKTKLLCSWGSQGKNVKDEDIIDESIDKLLRIDNTFWRMFSKVMFESKVKKRIMLYDVKFLSLVGYIGFKNWFIEQLRVVELHEVPWIVNAEGELVEIKSIKIYLQLIEQSLSLRITVLNYTDMAHALTRLIRKKLMCDNALFNPSSSPMFNLTQVIDPTTQLDYFPRIIFERLKSYDTSSDYNKGKLTRNYMTLLPWQHVNRYNFVFSSTGCKVSLKTCIGKLIKDLNPKVLYFIGEGAGNWMARTACEYPDIKFVYRSLKDDLDHHYPLEYQRVIGDLNRVIDSGEGLSMETTDATQKTHWDLIHRISKDALLITLCDAEFKNRDDFFKMVILWRKHVLSCRICTAYGTDLYLFAKYHAVDCNIKLPFFVRSVATFIMQGSKLSGSECYILLTLGHHNNLPCHGEIQNSKMRIAVCNDFYASKKLDNKSIEANCKSLLSGLRIPINKKELNRQKKLLTLQSNHSSIATVGGSKIIESKWLKNKASTIIDWLEHILNSPKGELNYDFFEALENTYPNMIKLIDNLGNAEIKKLIKVTGYMLVSKK

SEQ ID NO: 37 - protein, 2005 aa, human Metapneumo virus
MDPFCESTVNVYLPDSYLKGVISFSETNAIGSCLLKRPYLKKDNTAKVAVENPVVEHVRLRNAVMTKMKISDYKVVEPINMQHEIMKNIHSCELTLLKQFLTRSKNISSLKLSMICDWLQLKSTSDNTSILNFIDVEFIPVWVSNWFSNWYNLNKLILEFRREEVIRTGSILCRSLGKLVFIVSSYGCVVKSNKSKRVSFFTYNQLLTWKDVMLSRFNANFCIWVSNNLNKNQEGLGFRSNLQGMLTNKLYETVDYMLSLCSNEGFSLVKEFEGFIMSEILKITEHAQFSTRFRNTLLNGLTEQLSMLKAKNRSRVLGTILENNDYPMYEVVLKLLGDTLKSIKLLINKNLENAAELYYIFRIFGHPMVDEREAMDAVKLNNEITKILKLESLTELRGAFILRIIKGFVDNNKRWPKIKNLKVLSKRWVMYFKAKSYPSQLELSVQDFLELAAVQFEQEFSVPEKTNLEMVLNDKAISPPKKLIWSVYPKNYLPEIIKNQYLEEVFNASDSQRTRRVLEFYLKDCKFDQKDLKRYVLKQEYLNDKDHIVSLTGKERELSVGRMFAMQPGKQRQIQILAEKLLADNIVPFFPETLTKYGDLDLQRIMEMKSELSSIKTRKNDSYNNYIARASIVTDLSKFNQAFRYETTAICADVADELHGTQSLFCWLHLIVPMTTMICAYRHAPPETKGEYDIDKIEEQSGLYRYHMGGIEGWCQKLWTMEAISLLDVVSVKTRCQMTSLLNGDNQSIDVSKPVKLSEGIDEVKADYSLAIKMLKEIRDAYKNIGHKLKEGETYISRDLQFISKVIQSEGVMHPTPIKKILRVGPWINTILDDIKTSAESIGSLCQELEFRGESMLVSLILRNFWLYNLYMHESKQHPLAGKQLFKQLNKTLTSVQRFFELKKENDVVDLWMNIPMQFGGGDPVVFYRSFYRRTPDFLTEAISHVDLLLKVSNNIKNETKIRFFKALLSIEKNERATLTTLMRDPQAVGSERQAKVTSDINRTAVTSILSLSPNQLFCDSAIHYSRNEEEVGIIADNITPVYPHGLRVLYESLPFHKAEKVVNMISGTKSITNLLQRTSAINGEDIDRAVSMMLENLGLLSRILSVIINSIEIPIKSNGRLICCQISKTLREKSWNNMEIVGVTSPSIVTCMDVVYATSSHLKGIIIEKFSTDKTTRGQRGPKSPWVGSSTQEKKLVPVYNRQILSKQQKEQLEAIGKMRWVYKGTPGLRRLLNKICIGSLGISYKCVKPLLPRFMSVNFLHRLSVSSRPMEFPASVPAYRTTNYHFDTSPINQALSERFGNEDINLVFQNAISCGISIMSVVEQLTGRSPKQLVLIPQLEEIDIMPPPVFQGKFNYKLVDKITSDQHIFSPDKIDILTLGKMLMPTIKGQKTDQFLNKRENYFHGNNLIESLSAALACHWCGILTEQCVENNIFRKDWGDGFISDHAFMDFKIFLCVFKTKLLCSWGSQGKNVKDEDIIDESIDKLLRIDNTFWRMFSKVMFESKVKKRIMLYDVKFLSLVGYIGFKNWFIEQLRVVELHEVPWIVNAEGELVEIKPIKIYLQLIEQSLSLRITVLNYTDMAHALTRLIRKKLMCDNALFNPSSSPMFSLTQVIDPTTQLDYFPKVIFERLKSYDTSSDYNKGKLTRNYMTLLPWQHVNRYNFVFSSTGCKISLKTCIGKLIKDLNPKVLYFIGEGAGNWMARTACEYPDIKFVYRSLKDDLDHHYPLEYQRVIGDLNRVIDGGEGLSMETTDATQKTHWDLIHRISKDALLITLCDAEFKNRDDFFKMVILWRKHVLSCRICTAYGTDLYLFAKYHATDCNIKLPFFVRSVATFIMQGSKLSGSECYILLTLGHHNNLPCHGEIQNSKMRIAVCNDFHASKKLDNKSIEANCKSLLSGLRIPINKKELNRQKKLLTLQSNHSSIATVGGSKIIESKWLKNKASTIIDWLEHILNSPKGELNYDFFEALENTYPNMIKLIDNLGNAEIKKLIKVPGYMLVSKK

SEQ ID NO: 38 - DNA, 6018 bp, human Metapneumo virus
atggatcctctcaatgaatccactgttaatgtctatcttcctgactcatatcttaaaggagtgatttcctttagtgagactaatgcaattggttcatgtctcttaaaaagaccttacctaaaaaatgacaacactgcaaaagttgccatagagaatcctgttatcgagcatgttagactcaaaaatgcagtcaattctaagatgaaaatatcagattacaagatagtagagccagtaaacatgcaacatgaaattatgaagaatgtacacagttgtgagctcacattattaaaacagtttttaacaaggagtaaaaatattagcactctcaaattaaatatgatatgtgattggctgcagttaaagtctacatcagatgatacctcaatcctaagttttatagatgtagaatttatacctagctgggtaagcaattggtttagtaattggtacaatctcaacaagttgattctggaattcaggaaagaagaagtaataagaactggttcaatcttgtgtaggtcattgggtaaattagtttttgttgtatcatcatatggatgtatagtcaagagcaacaaaagcaaaagagtgagcttcttcacatacaatcaactgttaacatggaaagatgtgatgttaagtagattcaatgcaaatttttgtatatgggtaagcaacagtctgaatgaaaatcaagaagggctagggttgagaagtaatctgcaaggcatattaactaataagctatatgaaactgtagattatatgcttagtttatgttgcaatgaaggtttctcacttgtgaaagagttcgaaggctttattatgagtgaaattcttaggattactgaacatgctcaattcagtactagatttagaaatactttattaaatggattaactgatcaattaacaaaattaaaaaataaaaacagactcagagttcatggtaccgtgttagaaaataatgattatccaatgtacgaagttgtacttaagttattaggagatactttgagatgtattaaattattaatcaataaaaacttagagaatgctgctgaattatactatatatttagaatattcggtcacccaatggtagatgaaagagatgcaatggatgctgtcaaattaaacaatgaaatcacaaaaatccttaggtgggagagcttgacagaactaagaggggcattcatattaaggattatcaaaggatttgtagacaacaacaaaagatggcccaaaattaaaaacttaaaagtgcttagtaagagatggactatgtacttcaaagcaaaaagttaccccagtcaacttgaattaagcgaacaagattttttagagcttgctgcaatacagtttgaacaagagttttctgtccctgaaaaaaccaaccttgagatggtattaaatgataaagctatatcacctcctaaaagattaatatggtctgtgtatccaaaaaattacttacctgagaaaataaaaaatcgatatctagaagagactttcaatgcaagtgatagtctcaaaacaagaagagtactagagtactatttgaaagataataaattcgaccaaaaagaacttaaaagttatgttgttaaacaagaatatttaaatgataaggatcatattgtctcgctaactggaaaagaaagagaattaagtgtaggtagaatgtttgctatgcaaccaggaaaacagcgacaaatacaaatattggctgaaaaattgttagctgataatattgtaccttttttcccagaaaccttaacaaagtatggtgatctagatcttcagagaataatggaaatcaaatcggaactttcttctattaaaactagaagaaatgatagttataataattacattgcaagagcatccatagtaacagatttaagtaagttcaaccaagcctttaggtatgaaactacagcgatctgtgcggatgtagcagatgaactacatggaacacaaagcctattctgttggttacatcttatcgtccctatgacaacaatgatatgtgcctatagacatgcaccaccagaaacaaaaggtgaatatgatatagataagatagaagagcaaagtggtttatatagatatcatatgggtggtattgaaggatggtgtcaaaaactctggacaatggaagctatatctctattagatgttgtatctgtaaaaacacgatgtcaaatgacatctttattaaacggtgacaaccaatcaatagatgtaagtaaaccagttaagttatctgagggtttagatgaagtgaaagcagattatagcttggctgtaaaaatgttaaaagaaataagagatgcatacagaaatataggccataaacttaaagaaggggaaacatatatatcaagagatcttcagtttataagtaaggtgattcaatctgaaggagtaatgcatcctacccctataaaaaagatcttaagagtgggaccatggataaacacaatattagatgacattaaaaccagtgcagagtcaatagggagtctatgtcaggaattagaatttaggggggaaagcataatagttagtctgatattaaggaatttttggctgtataatttatacatgcatgaatcaaagcaacaccccctagcagggaagcagttattcaaacaactaaataaaacattaacatcagtgcagagattttttgaaataaaaaaggaaaatgaagtagtagatctatggatgaacataccaatgcagtttggaggaggagatccagtagtcttctatagatctttctatagaaggacccctgattttttaactgaagcaatcagtcatgtggatattctgttaagaatatcagccaacataagaaatgaagcgaaaataagtttcttcaaagccttactgtcaatagaaaaaaatgaacgtgctacactgacaacactaatgagagatcctcaagctgttggctcagagcgacaagcaaaagtaacaagtgatatcaatagaacagcagttaccagcatcttaagtctttctccaaatcaacttttcagcgatagtgctatacactacagtagaaatgaagaagaggtcggaatcattgctgacaacataacacctgtttatcctcatggactgagagttttgtatgaatcattaccttttcataaagctgaaaaagttgtgaatatgatatcaggaacgaaatccataaccaacttattacagagaacatctgctattaatggtgaagatattgacagagctgtatccatgatgctggagaacctaggattattatctagaatattgtcagtagttgttgatagtatagaaattccaaccaaatctaatggtaggctgatatgttgtcagatatctagaaccctaagggagacatcatggaataatatggaaatagttggagtaacatcccctagcatcactacatgcatggatgtcatatatgcaactagctctcatttgaaagggataatcattgaaaagttcagcactgacagaactacaagaggtcaaagaggtccaaagagcccttgggtagggtcgagcactcaagagaaaaaattagttcctgtttataacagacaaattctttcaaaacaacaaagagaacagctagaagcaattggaaaaatgagatgggtatataaagggacaccaggtttaagacgattactcaataagatttgtcttggaagtttaggcattagttacaaatgtgtaaaacctttattacctaggtttatgagtgtaaatttcctacacaggttatctgtcagtagtagacctatggaattcccagcatcagttccagcttatagaacaacaaattaccattttgacactagtcctattaatcaagcactaagtgagagatttgggaatgaagatattaatttggtcttccaaaatgcaatcagctgtggaattagcataatgagtgtagtagaacaattaactggtaggagtccaaaacagttagttttaatacctcaattagaagaaatagacattatgccaccaccagtgtttcaagggaaattcaattataagctagtagataagataacttctgatcaacatatcttcagtccagacaaaatagatatgttaacactggggaaaatgctcatgcccactataaaaggtcagaaaacagatcagttcctgaacaagagagagaattatttccatgggaataatcttattgagtctttgtcagcagcgttagcatgtcattggtgtgggatattaacagagcaatgtatagaaaataatattttcaagaaagactggggtgacgggttcatatcggatcatgcttttatggacttcaaaatattcctatgtgtctttaaaactaaacttttatgtagttgggggtcccaagggaaaaacattaaagatgaagatatagtagatgaatcaatagataaactgttaaggattgataatactttttggagaatgttcagcaaggttatgtttgaatcaaaggttaagaaaaggataatgttatatgatgtaaaatttctatcattagtaggttatatagggtttaagaattggtttatagaacagttgagatcagctgagttgcatgaggtaccttggattgtcaatgccgaaggtgatctggttgagatcaagtcaattaaaatctatttgcaactgatagagcaaagtttatttttaagaataactgttttgaactatacagatatggcacatgctctcacaagattaatcagaaagaagttgatgtgtgataatgcactattaactccgattccatccccaatggttaatttaactcaagttattgatcctacagaacaattagcttatttccctaagataacatttgaaaggctaaaaaattatgacactagttcaaattatgctaaaggaaagctaacaaggaattacatgatactgttgccatggcaacatgttaatagatataactttgtctttagttctactggatgtaaagttagtctaaaaacatgcattggaaaacttatgaaagatctaaaccctaaagttctgtactttattggagaaggggcaggaaattggatggccagaacagcatgtgaatatcctgacatcaaatttgtatacagaagtttaaaagatgaccttgatcatcattatcctttggaataccagagagttataggagaattaagcaggataatagatagcggtgaagggctttcaatggaaacaacagatgcaactcaaaaaactcattgggatttgatacacagagtaagcaaagatgctttattaataactttatgtgatgcagaatttaaggacagagatgatttttttaagatggtaattctatggaggaaacatgtattatcatgcagaatttgcactacttatgggacagacctctatttattcgcaaagtatcatgctaaagactgcaatgtaaaattacctttttttgtgagatcagtagccacctttattatgcaaggtagtaaactgtcaggctcagaatgctacatactcttaacactaggccaccacaacaatttaccctgccatggagaaatacaaaattctaagatgaaaatagcagtgtgtaatgatttttatgctgcaaaaaaacttgacaataaatctattgaagccaactgtaaatcacttttatcagggctaagaataccgataaataagaaagaattaaatagacagagaaggttattaacactacaaagcaaccattcttctgtagcaacagttggaggtagcaaggtcatagagtctaaatggttaacaaacaaggcaaacacaataattgattggttagaacatattttaaattctccaaaaggtgaattaaattatgatttttttgaagcattagaaaatacttaccctaatatgattaaactaatagataatctagggaatgcagagataaaaaaactgatcaaagtaactggatatatgcttgtaagtaaaaaatga

SEQ ID NO: 39 - DNA, 6018 bp, human Metapneumo virus
atggatcctcttaatgaatccactgttaatgtctatctccctgattcgtaccttaaaggagtaatttcttttagtgaaactaatgcaattggttcatgtctcttaaaaagaccttacttaaaaaatgacaacactgcaaaagttgccatagagaatcctgttattgagcatgtgagactcaaaaatgcagtcaattctaaaatgaaaatatcagattacaaggtagtagagccagtaaacatgcaacatgaaataatgaagaatgtacacagttgtgagctcacactattgaaacagtttttaacaaggagtaaaaacattagcactctcaaattaaatatgatatgtgattggctgcaattaaagtctacatcagatgatacctcaatcctaagtttcatagatgtagaatttatacctagttgggtaagcaactggtttagtaattggtacaatctcaataagttaattttggaattcagaagagaggaagtaataagaaccggttcaatcttatgcaggtcattgggtaaattagtttttattgtatcatcatacggatgtatcgtcaagagcaacaaaagcaaaagagtgagcttcttcacatacaatcaactgttaacatggaaagatgtgatgttaagtagatttaatgcgaatttttgtatatgggtaagcaatagtctgaatgaaaatcaggaagggctagggttaagaagtaatctacaaggtatgttaactaataaactatatgaaactgtagattatatgctaagtttatgttgcaatgaaggtttctcacttgtaaaagagttcgaaggttttattatgagtgaaatccttaggattactgaacatgctcaattcagtactagatttagaaatactttattaaatggattaacagatcaattaacaaaattaaaaaataaaaacagactcagagttcatggtaccgtattagaaaataatgattatccaatgtatgaagttgtacttaaattattaggagatactttgagatgtatcaaattattaatcaataaaaacttagagaatgctgcagaattatactatatattcagaatttttggtcatccaatggtagatgaaagagatgcaatggatgctgtcaaattaaacaatgaaatcacaaaaatcctaaggttggagagcttgacagaactaagaggagcattcatattaaggattatcaaaggatttgtggacaacaacaaaaggtggcccaaaattaaaaatttaatagtgcttagcaaaagatggactatgtacttcaaagctaaaaattatcccagtcaactcgaattaagtgaacaagactttctagagcttgctgcaatacaatttgaacaagagttttctgttcctgaaaaaaccaatcttgagatggtattaaatgacaaagccatatcacctcctaaaagattaatatggtctgtgtatccaaagaattacttacctgagacgataaaaaatcgatatttagaagaaactttcaatgcgagtgatagtctcaaaacaagaagagtactagagtactatttaaaagacaataaatttgatcaaaaggaacttaaaagttatgtagttagacaagaatatttaaatgataaggagcacattgtctcattaactggaaaagaaagagaattaagtgtaggtagaatgtttgctatgcaaccaggaaaacagcgacaaatacaaatattggcagaaaaattgttagctgataacattgtacctttcttcccggaaaccttaacaaagtatggtgatctagatcttcagagaataatggaaatcaaatcagaactttcttctatcaaaaccagaagaaatgacagttataataattacattgcaagagcatccatagtaacagatttgagcaagttcaaccaagcctttagatatgaaactacagcgatctgtgcggatgtagcagacgaattacatggaacacaaagcttattctgttggttacatcttatcgttcctatgactacaatgatatgtgcctatagacatgcaccaccagaaacaaaaggtgaatatgatatagataagatagaagagcaaagtggtctatatagatatcacatgggcggtattgaaggatggtgtcaaaaactctggacaatggaagctatatctttattggatgttgtatctgtaaagacacggtgtcaaatgacatctttattaaacggtgataaccaatcaatagatgtaagtaaaccagtcaagttatctgaaggtttagatgaagtgaaggcagattatcgcttagcaataaaaatgctaaaagaaataagagatgcatacagaaatataggccataaacttaaagaaggggaaacatatatatcaagggatcttcaatttataagcaaggtgattcaatctgaaggagtgatgcatcctacccctataaaaaaggtcttgagagtaggaccatggataaacacaatattagatgacattaaaactagtgctgagtcaatagggagtctatgtcaagaattagaatttaggggagaaagcataatagttagtctgatattaagaaacttctggctgtataacttatacatgcatgaatcaaagcaacatcctttggcagggaaacagttattcaaacaactaaataaaacattaacatcagtgcagagattttttgaaattaaaaaggaaaatgaggtagtagatctatggatgaacataccaatgcaatttggaggaggagatccagtagtcttctatagatctttctatagaaggacccctgattttttaactgaggcaatcagccatgtagatattctgttaaaaatatcagctaacataaaaaatgaaacgaaagtaagtttcttcaaagccttactatcaatagaaaaaaatgaacgtgctacactgacaacgctaatgagagatcctcaagctgttggatcagaacgacaagcaaaagtaacaagtgacatcaatagaacagcagttaccagtatcttaagtctttccccaaatcaacttttcagtgatagtgctatacactatagcaggaatgaagaagaagtgggaatcattgcagaaaacataacacctgtttatcctcatgggctgagagtattatatgaatcattgccctttcacaaagctgaaaaagttgtaaacatgatatcagggacaaaatctataaccaacttattacagagaacatccgctattaatggtgaagatattgacagggctgtatctatgatgttggagaatctaggattattatctagaatattgtcagtagttgttgatagtatagaaattccaatcaaatctaatggtaggctgatatgttgtcaaatctctaggactttaagagagacatcatggaataatatggaaatagttggagtaacatctcctagcatcactacatgtatggatgtcatatatgcaactagttctcatttgaaggggataattatagaaaagttcagcactgacagaactacaaggggtcaaagaggtccaaaaagcccttgggtagggtcgagtactcaagagaaaaaattagtacctgtttataacagacaaattctttcaaaacaacaaagagaacagctagaagcaattggaaaaatgagatgggtgtataaagggacaccaggcttgcgacgattactcaacaagatctgtcttgggagtttaggcattagttacaaatgtgtaaaacctttattacctaggtttatgagtgtaaatttcttacataggttatctgtcagtagtagacctatggaattcccagcatcagttccagcttatagaacaacaaattaccatttcgacactagtcctattaatcaagcactaagtgagagatttgggaatgaagatattaacttggtcttccaaaatgcgatcagctgtggaattagcataatgagtgtagtagaacaattaacaggtagaagcccaaaacagttagttttaataccccaattagaagaaatagacattatgccaccaccagtgtttcaagggaaattcaattataaattagtagataagataacttctgatcaacatatcttcagtccggacaaaatagatatgttaacactagggaaaatgctcatgcctactataaaaggtcagaaaacagatcagttcttaaataagagagagaattatttccatgggaacaatcttattgagtctttatcagcagcattagcatgtcattggtgtgggatattaacagaacaatgcatagaaaataatattttcaagaaggactggggtgacgggtttatatcagatcatgcttttatggacttcaaaatattcctatgtgtctttaaaactaaacttttatgtagttggggatcccaagggaaaaacattaaagatgaagatatagtagatgaatcaatagataaattgttaaggattgacaatactttttggagaatgttcagcaaagttatgtttgaaccaaaagttaagaaaaggataatgttatatgatgtaaaattcctatcactagtaggctacatagggtttaagaactggtttatagagcagttgagatcagctgaattgcatgaaataccttggattgtcaatgccgaaggtgatttggttgagatcaagtcaattaaaatctatttgcaactgatagaacaaagcttatttttaagaataactgttttgaactatacagatatggcacatgctctcacacgattaatcagaaagaagttaatgtgtgataatgcactgttaaccccaatttcatccccaatggttaacttaactcaagttattgatcccacaacacaattagattacttccccaagataacattcgaaaggctaaaaaattatgacacaagttcaaattatgctaaaggaaagctaacaagaaattacatgatactattgccatggcagcatgttaatagatataactttgtctttagttctactggatgtaaagttagtctgaaaacatgtattggaaaacttatgaaagacttaaatcctaaagttttgtactttattggagaaggagcaggaaattggatggccagaacagcatgtgaatatcctgatattaaatttgtatatagaagtctgaaagatgaccttgatcatcattatcctctggaataccagagagtgataggtgaattaagcagaatcatagatagtggtgaaggactttcaatggaaacaacagacgcaactcaaaaaactcattgggatttgatacacagggtaagcaaagatgctttattaataactttatgtgatgcagaatttaaggacagagatgatttttttaagatggtaattctatggagaaaacatgtattatcatgcagaatttgcactacttatgggacggacctctatttattcgcaaagtatcatgctaaagactgcaatgtaaaattacctttttttgtgagatcagttgctactttcattatgcagggtagtaagctgtcaggttcagaatgctacatactcttaacactaggccaccacaacagtttaccttgccatggagaaatacaaaattctaagatgaaaatagcagtgtgtaatgatttttatgctgcaaaaaaactcgacaataaatcaattgaagctaattgtaaatcacttttgtcagggctaagaatacctataaataagaaggaactagatagacagagaagattattaacactacaaagcaatcattcttctgtggcaacagttggcggtagcaagatcatagagtctaaatggttaacaaacaaagcaagtacaataattgattggttagaacatattttaaattctccaaagggcgaattaaattatgatttttttgaagcattggagaacacttaccctaatatgattaaactaatagataacttagggaatgcagagattaaaaaacttatcaaagtaacaggatacatgcttgtaagtaaaaaatga

SEQ ID NO: 40 - DNA, 6018 bp, human Metapneumo virus
atggatcccttttgtgaatctactgttaatgtttatctccctgattcatatctcaaaggagtaatatcttttagtgaaaccaatgcaattggatcatgtcttttgaaaagaccctatctaaaaaatgacaacactgccaaagttgctgtagaaaaccctgttgttgaacatgtgaggcttagaaatgcagtcatgaccaaaatgaagatatcagattataaagtggttgaaccagttaatatgcagcatgaaataatgaaaaatatacatagttgtgagcttacattattaaaacaattcttaacgagaagcaaaaacattagctctctaaaattaaatatgatatgtgattggttacagttaaaatccacttcagataacacatcaattctcaattttatagatgtggagttcatacccgtttgggtaagcaattggttcagtaactggtataatctcaataaattaatcttagagtttagaagagaagaagtaataagaactggttcaattttatgtagatcactaggcaagttagtttttattgtatcatcttatggatgtgtagtaaaaagcaacaaaagtaaaagagtgagctttttcacctataaccaactgttaacatggaaagatgtgatgttaagtagattcaatgcaaacttttgtatatgggtaagtaacaacctgaacaaaaatcaagaaggactaggacttagaagcaatctgcaaggtatgttaaccaataaattatatgaaactgttgattacatgctaagcctatgctgcaatgaaggattctctctggtgaaagagtttgaaggatttattatgagtgaaattctaaaaattactgagcatgctcagttcagtactaggtttaggaatactttattgaatgggttaactgaacaattatcagtgttgaaagctaagaacagatctagagttcttggaactatattagaaaacaacaattaccctatgtacgaagtagtacttaaattattaggggacaccttgaaaagcataaagttattaattaacaagaatttagaaaatgctgcagaattatattatatattcagaatttttggacaccctatggtagatgagagggaagcaatggatgctgttaaattaaacaatgagattacaaaaattcttaaattagagagtttaacagaactaagaggagcatttatactaagaattataaaagggtttgtagacaataataaaagatggcctaaaattaagaatttaaaagtgctcagcaaaagatgggctatgtatttcaaagctaaaagttaccctagccaacttgagctaagtgtacaagattttttagaacttgctgcagtacaatttgagcaggaattctctgtacctgaaaaaaccaaccttgagatggtattaaatgataaagcaatatcacctccaaaaaagctaatatggtctgtatatccaaaaaactacctgcctgaaactataaaaaatcaatatttagaagaggctttcaatgcaagtgacagccaaagaacaaggagagtcttagaattttacttaaaagattgtaaatttgatcaaaaagaacttaaacgttatgtaattaaacaagagtatctgaatgacaaagaccacattgtctcgttaactgggaaggaaagagaattaagtgtaggtaggatgtttgcaatgcaaccaggaaaacaaagacagatacagatattagctgagaaacttctagctgataatattgtaccttttttcccagaaactttaacaaagtatggtgacttagatctccaaagaattatggaaataaaatcagaactttcttccattaaaactagaaagaatgatagctacaacaattatattgcaagggcctctatagtaacagacttaagtaagttcaatcaggcctttagatatgaaaccacagctatatgtgcagatgtagctgatgagttacatgggacacaaagcttattctgttggttacatcttattgttcccatgactacaatgatatgtgcatacagacatgcaccaccagaaacaaaaggggaatatgatatagacaaaatacaagagcaaagcggattatacagatatcatatgggagggattgaagggtggtgccagaagttatggacaatggaagcaatatccttgttagatgtagtatctgtgaagactcgctgtcagatgacctctctattaaacggagacaatcagtcaatagatgttagtaaaccagtaaaattgtctgaaggtatagatgaagtaaaagcagactatagcttagcaattagaatgcttaaagaaataagagatgcttataaaaacattggtcataaactcaaagaaggtgaaacatatatatcaagggatctccaatttataagtaaggtgattcaatctgaaggagtcatgcatcctacccctataaaaaagatattaagagtaggtccttggataaatacaatactagatgatattaaaaccagtgcagaatcaataggaagtctatgtcaagaactagaattcagaggggagagtatactagttagcttgatattaaggaatttctggctgtataacttgtacatgtatgagtcaaaacagcacccattagctgggaagcaactgttcaagcaattgaacaaaacattaacatctgtgcagagattttttgaactgaagaaagaaaatgatgtggttgacctatggatgaatataccaatgcagtttggagggggagatccagtagttttttacagatctttttacagaaggactcccgatttcctaactgaagcaatcagccatgtggatttactgttaaaagtgtcaaacaatatcaaagatgagactaagatacgatttttcaaagccttattatctatagaaaagaatgaacgtgctacattaacaacactaatgagagaccctcaggcagtaggatcagaacgacaagctaaggtaacaagtgatataaatagaacagcagttaccagcatactgagtctatctccgaatcagctcttctgtgatagtgctatacattatagtagaaatgaggaagaagttgggatcattgcagacaacataacacctgtctatcctcatgggctgagagtgctctatgaatcactaccttttcataaggctgaaaaggttgtcaatatgatatcaggcacaaagtctataactaatctattacagagaacatctgctatcaatggtgaagatattgatagagcagtgtctatgatgttagagaacttagggttgttatctagaatattgtcagtaataattaatagtatagaaataccaatcaagtccaatggcagattgatatgctgtcaaatttccaagaccttgagagaaaaatcatggaacaatatggaaatagtaggagtgacatctcctagtattgtgacatgtatggatgttgtgtatgcaactagttctcatttaaaaggaataattattgaaaaattcagtactgacaagaccacaagaggtcagaggggaccaaaaagcccctgggtaggatcaagcactcaagagaaaaaattggttcctgtttataatagacaaattctttcaaaacaacaaaaagagcaactggaagcaatagggaaaatgaggtgggtgtacaaaggaactccagggctaagaagattgctcaacaagatttgcataggaagcttaggtattagctataaatgtgtgaaacctttattaccaagattcatgagtgtaaacttcttacataggttatctgttagtagtagacccatggaattcccagcttctgttccagcttacaggacaacaaattaccattttgacactagtccaatcaaccaagcattaagtgagaggttcgggaacgaagacattaatttagtgttccaaaatgcaatcagctgcggaattagtataatgagtgttgtagaacagttaactggtagaagcccaaaacaattagtcctaatccctcaattagaagagatagatattatgcctcctcctgtatttcaaggaaaattcaattataaactagttgataagataacctccgatcaacacatcttcagtcctgacaaaatagacatattaacactagggaagatgcttatgcctaccataaaaggtcaaaaaactgatcagttcttaaataagagagaaaactattttcatggaaataatttaattgaatctttatctgcagcacttgcatgccactggtgtgggatattaacagaacagtgcatagaaaacaatatctttaggaaagattggggtgatgggttcatctcagatcatgccttcatggatttcaaggtatttctatgtgtatttaaaaccaaacttttatgtagttggggatctcaaggaaagaatgtaaaagatgaagatataatagatgaatccattgacaaattattaagaattgacaacaccttttggagaatgttcagcaaagtcatgtttgaatcaaaagtcaaaaaaagaataatgttatatgatgtgaaattcctatcattagtaggttatataggatttaaaaactggtttatagaacagttaagagtggtagaattgcatgaggtaccttggattgtcaatgctgaaggagagttagttgaaattaaatcaatcaaaatttatctgcagttaatagaacaaagtctatctttgagaataactgtattgaattatacagacatggcacatgctcttacacgattaattaggaaaaaattgatgtgtgataatgcactctttaatccaagttcatcaccaatgtttaatctaactcaggttattgatcccacaacacaactagactattttcctaggataatatttgagaggttaaaaagttatgataccagttcagactacaacaaagggaagttaacaaggaattacatgacattattaccatggcaacacgtaaacaggtacaattttgtctttagttctacaggttgtaaagtcagtttgaagacatgcatcgggaaattgataaaggatttaaatcctaaagttctttactttattggagaaggagcaggtaactggatggcaagaacagcatgtgaatatcctgatataaaatttgtatataggagtttaaaggatgaccttgatcaccattacccattagaatatcaaagggtaataggtgatctaaatagggtgatagatagtggtgaaggattatcaatggaaaccacagatgcaactcaaaaaactcattgggacttgatacacagaataagtaaagatgctttattgataacattgtgtgatgcagaattcaaaaacagagatgatttctttaagatggtaatcctttggagaaaacatgtattatcttgtagaatctgtacagcttatggaacagatctttacttatttgcaaagtatcatgcggtggactgcaatataaaattaccattttttgtaagatctgtagctacttttattatgcaaggaagcaaattatcagggtcagaatgttacatacttttaacattaggtcatcacaataatctaccctgtcatggagaaatacaaaattccaaaatgagaatagcagtgtgtaatgatttctatgcctcaaagaaactggacaacaaatcaattgaagcaaactgcaaatctcttctatcaggattgagaatacctataaacaaaaaggagttaaatagacaaaagaaattgttaacactacaaagtaaccattcttctatagcaacagttggcggcagtaagattatagaatccaaatggttaaagaataaagcaagtacaataattgattggttagagcatattttgaattctccaaaaggtgaattaaactatgatttctttgaagcattagagaacacataccccaatatgatcaagcttatagataatttgggaaatgcagaaataaagaaactaatcaaggtcactgggtatatgcttgtgagtaagaagtaa

SEQ ID NO: 41 - DNA, 6018 bp, human Metapneumo virus
atggatccattttgtgaatccactgtcaatgtttatcttcctgactcatatctcaaaggagtaatatctttcagtgaaaccaatgcaattggctcatgccttttgaaaagaccctatctaaaaaaagataacactgctaaagttgctgtagaaaaccctgttgttgaacatgtcaggcttagaaatgcagtcatgaccaaaatgaagatatcagattataaagtggttgaaccaattaatatgcagcatgaaataatgaaaaatatacacagttgtgagctcacattattaaaacaattcttaacaagaagtaaaaacattagctctctaaaattaagtatgatatgtgattggttacagttaaaatccacctcagataacacatcaattcttaattttatagatgtggagtttatacctgtttgggtgagcaattggtttagtaactggtataatctcaataaattaatcttagagtttagaagagaggaagtaataagaactggttcaattttatgtagatcactaggcaagttagttttcattgtatcatcttatgggtgtgtagtaaaaagcaacaaaagtaaaagagtaagttttttcacatataaccaactgttaacatggaaagatgtgatgttaagtaggttcaatgcaaacttttgtatatgggtaagtaacaacctgaacaaaaatcaagaaggactaggatttagaagtaatctgcaaggtatgttaaccaataaattatatgaaactgttgattatatgttaagtctatgtagtaatgaagggttctcactagtgaaagagttcgaaggctttattatgagtgaaattcttaaaattactgagcatgctcaattcagtactaggtttaggaatactttattaaatgggttgactgaacaattatcaatgttgaaagctaaaaacagatctagagttcttggcactatattagaaaacaatgattaccccatgtatgaagtagtacttaaattattaggggacactttgaaaagtataaaattattaattaacaagaatttagaaaatgctgcagaattatattatatattcagaatttttggacaccctatggtagatgagagggaagcaatggatgctgttaaattaaataatgagattacaaaaattcttaaactggagagcttaacagaactaagaggagcatttatactaagaattataaaagggtttgtagataataataaaagatggcctaaaattaagaatttaaaagtgctcagtaaaagatgggttatgtatttcaaagccaaaagttaccctagccaacttgagctaagtgtacaagattttttagaacttgctgcagtacaattcgaacaggaattttctgtccctgaaaaaaccaaccttgagatggtattaaatgataaagcaatatctcctccaaaaaagttaatatggtcggtatatccaaaaaattatctacctgaaattataaaaaatcaatatttagaagaggtcttcaatgcaagtgacagtcaaagaacgaggagagtcttagaattttacttaaaagattgcaaatttgatcaaaaagaccttaaacgttatgtacttaaacaagagtatctaaatgacaaagaccacattgtctcattaactgggaaggaaagagaattaagtgtaggcaggatgtttgcaatgcaaccaggcaaacaaagacaaatacagatactagctgagaaacttctagctgataatattgtaccctttttcccagaaactttaacaaagtatggtgacttggatctccaaagaattatggaaatgaaatcagaactttcttccattaaaactaggaagaatgatagttacaacaattatattgcaagagcctccatagtaacagacctaagtaaattcaatcaagcctttagatatgaaaccacagctatctgtgcagatgtagcagatgagttacatggtacgcaaagcttattttgttggttacatcttattgttcccatgaccacaatgatatgtgcatacagacatgcaccaccagaaacaaagggggagtatgacatagacaaaatagaagagcaaagtgggctatacagatatcatatgggagggattgaagggtggtgtcagaagttatggacaatggaagcgatatccttgttagatgtagtatctgttaagactcgttgtcagatgacctctctattaaacggagacaatcaatcaatagatgtcagtaaaccagtaaaattgtctgaaggtatagatgaagtaaaagcagattatagcttagcaattaaaatgcttaaagagataagagatgcctataaaaacattggccataaactcaaagaaggtgaaacatatatatcaagagatctccaatttataagtaaggtgattcaatctgagggggtcatgcatcctacccccataaaaaagatattaagggtaggtccctggataaatacaatactagatgacattaaaaccagtgcagaatcaatagggagtctgtgtcaagaactagagttcagaggagaaagtatgctagttagcttgatattaaggaatttctggctgtataacttatacatgcatgagtcaaaacagcatccgttagctggaaaacaactgtttaagcaattgaacaaaacactaacatctgtgcaaagattttttgagctgaagaaagaaaatgatgtggttgacctatggatgaatataccaatgcagtttggagggggagacccagtagttttttacagatctttttacagaaggactcctgatttcctgactgaagcaatcagccatgtggatttactgttaaaagtttcgaacaatattaaaaatgagactaagatacgattctttaaagccttattatctatagaaaagaatgaacgtgcaacattaacaacactaatgagagacccccaggcggtaggatcggaaagacaagctaaggtaacaagtgatataaatagaacagcagttactagcatactgagtctatctccgaatcagctcttttgtgatagtgctatacactatagcagaaatgaagaagaagtcgggatcattgcagacaacataacacctgtttatcctcacggattgagagtgctctatgaatcactaccttttcataaggctgaaaaggttgtcaatatgatatcaggtacaaagtctataactaacctattgcagagaacatctgctatcaatggtgaagatattgatagagcagtgtctatgatgttagagaacttagggttgttatctaggatattgtcagtaataattaatagtatagaaataccaattaagtccaatggcagattgatatgctgtcaaatttctaagactttgagagaaaaatcatggaacaatatggaaatagtaggagtgacatctccaagtattgtaacatgtatggatgttgtgtatgcaactagttctcatttaaaaggaataattattgaaaaattcagtactgacaagaccacaagaggtcagaggggaccaaaaagcccctgggtaggatcaagcactcaagagaaaaaattagttcctgtttataatagacaaattctttcaaaacaacaaaaggagcaactggaagcaataggaaaaatgaggtgggtgtataaaggaactccagggctaagaagattgctcaataagatttgcataggaagtttaggtattagctataaatgtgtaaaacctctattaccaagattcatgagtgtaaacttcttacataggttatctgttagtagcagacccatggaattcccagcttctgttccagcttataggacaacaaattaccactttgacactagtccaatcaaccaagcattaagtgagaggttcgggaacgaagacattaatctagtgttccaaaatgcaatcagctgcggaattagtataatgagtgttgtagaacagttaactggtagaagcccaaaacaattagtcttaatcccccaattagaagagatagatattatgcctcctcctgtatttcaaggaaaattcaattataaactagttgataaaataacctctgatcaacacatcttcagtcctgacaaaatagacatattaacactagggaagatgcttatgcctactataaaaggtcaaaaaactgatcagttcttaaataagagagaaaactatttccatggaaataatttaattgaatctttatctgcagcacttgcatgccactggtgtggaatattaacagaacagtgtgtagaaaacaatatctttaggaaagactggggtgatgggttcatatcagatcatgccttcatggatttcaagatatttctatgtgtatttaaaaccaaacttttatgtagttggggatcccaagggaaaaatgtaaaagatgaagatataatagatgaatccattgacaaattattaagaattgacaacactttttggagaatgttcagcaaagtcatgtttgaatcaaaggtcaaaaaaagaataatgttatatgatgtaaaattcctatcattagtaggttatataggatttaaaaactggtttatagagcagttaagagtagtagaattgcatgaagtgccctggattgtcaatgctgaaggggagctagttgaaattaaaccaatcaaaatttatttgcagttaatagaacaaagtctatctttaagaataactgttttgaattatacagacatggcacatgctcttacacgattaattaggaagaaattgatgtgtgataatgcactcttcaatccaagttcatcaccaatgtttagtctaactcaagttatcgatcctacaacacagctagactattttcctaaggtgatatttgaaaggttaaaaagttatgataccagttcagactacaacaaagggaagttaacaagaaattacatgacattattaccatggcagcacgtaaacaggtataattttgtctttagttcaacaggatgtaaaatcagcttgaagacatgcatcgggaaattgataaaggacttaaaccctaaggttctttactttattggagaaggagcaggtaactggatggcaagaacagcatgtgagtatcctgacataaaatttgtatataggagtttaaaggatgatcttgatcatcattacccattagaatatcaaagggtaataggtgatttaaatagggtaatagatggtggtgaaggactatcaatggagaccacagatgcaactcaaaagactcattgggacttaatacacagaataagtaaagatgctttattgataacattgtgtgatgcagaattcaaaaacagagatgatttctttaaaatggtaattctttggagaaaacatgtattatcatgtagaatctgtacagcttatggaacagatctttacttatttgcaaagtatcatgcgacggactgcaatataaaattaccattttttgtaaggtctgtagctacttttattatgcaaggaagcaaattgtcaggatcagaatgttacatacttttaacattaggtcatcacaataatctgccatgccatggagaaatacaaaattccaaaatgagaatagcagtgtgtaatgatttccatgcctcaaaaaaactagacaacaaatcaattgaagctaactgtaaatctcttctatcaggattaagaataccaataaacaaaaaagagttaaatagacaaaagaaactgttaacactacaaagcaatcattcttccatagcaacagttggcggcagtaagattatagaatccaaatggttaaagaataaagcaagtacaataattgattggttagagcatatcttgaattctccaaaaggtgaattaaactatgatttctttgaagcattagagaacacataccccaatatgatcaagcttatagataacctgggaaatgcagagataaaaaaactaatcaaagttcctgggtatatgcttgtgagtaagaagtaa

SEQ ID NO: 42 - protein, 187 aa, human Metapneumo virus
MSRKAPCKYEVRGKCNRGSECKFNHNYWSWPDRYLLIRSNYLLNQLLRNTDRADGLSIISGAGREDRTQDFVLGSTNVVQGYIDDNQSITKAAACYSLHNIIKQLQEVEVRQARDNKLSDSKHVALHNLVLSYMEMSKTPASLINNLKRLPREKLKKLAKLIIDLSAGAENDSSYALQDSESTNQVQ

SEQ ID NO: 43 - protein, 187 aa, human Metapneumo virus
MSRKAPCKYEVRGKCNRGSECKFNHNYWSWPDRYLLIRSNYLLNQLLRNTDRADGLSIISGAGREDRTQDFVLGSTNVVQGYIDDNQSITKAAACYSLHNIIKQLQEVEVRQARDSKLSDSKHVALHNLILSYMEMSKTPASLINNLKRLPREKLKKLAKLIIDLSAGADNDSSYALQDSESTNQVQ

SEQ ID NO: 44 - protein, 187 aa, human Metapneumo virus
MSRKAPCKYEVRGKCNRGSDCKFNHNYWSWPDRYLLLRSNYLLNQLLRNTDKADGLSIISGAGREDRTQDFVLGSTNVVQGYIDDNQGITKAAACYSLHNIIKQLQETEVRQARDNKLSDSKHVALHNLILSYMEMSKTPASLINNLKKLPREKLKKLARLIIDLSAGTDNDSSYALQDSESTNQVQ

SEQ ID NO: 45 - protein, 187 aa, human Metapneumo virus
MSRKAPCKYEVRGKCNRGSECKFNHNYWSWPDRYLLLRSNYLLNQLLRNTDKADGLSIISGAGREDRTQDFVLGSTNVVQGYIDNNQGITKAAACYSLHNIIKQLQEIEVRQARDNKLSDSKHVALHNLILSYMEMSKTPASLINNLKKLPREKLKKLAKLIIDLSAGTDNDSSYALQDSESTNQVQ

SEQ ID NO: 46 - DNA, 564 bp, human Metapneumo virus
atgtctcgcaaggctccgtgcaaatatgaagtgcggggcaaatgcaatagaggaagtgagtgcaagtttaaccacaattactggagttggccagatagatacttattaataagatcaaattatttattaaatcaacttttaaggaacactgatagagctgatggcttatcaataatatcaggagcaggcagagaagataggacacaagattttgtcctaggttccaccaatgtggttcaaggttatattgatgataaccaaagcataacaaaagctgcagcctgttacagtctacataatataatcaaacaactacaagaagttgaagttaggcaggctagagataacaaactatctgacagcaaacatgtagcacttcacaacttagtcctatcttatatggagatgagcaaaactcctgcatctttaatcaacaatctcaagagactgccgagagagaaactgaaaaaattagcaaagctcataattgacttatcagcaggtgctgaaaatgactcttcatatgccttgcaagacagtgaaagcactaatcaagtgcagtga

SEQ ID NO: 47 - DNA, 564 bp, human Metapneumo virus
atgtctcgcaaggctccatgcaaatatgaagtgcggggcaaatgcaacagaggaagtgagtgtaagtttaaccacaattactggagttggccagatagatacttattaataagatcaaactatctattaaatcagcttttaaggaacactgatagagctgatggcctatcaataatatcaggcgcaggcagagaagacagaacgcaagattttgttctaggttccaccaatgtggttcaaggttatattgatgataaccaaagcataacaaaagctgcagcctgctacagtctacacaacataatcaagcaactacaagaagttgaagttaggcaggctagagatagcaaactatctgacagcaagcatgtggcactccataacttaatcttatcttacatggagatgagcaaaactcccgcatctttaatcaacaatcttaaaagactgccgagagaaaaactgaaaaaattagcaaagctgataattgacttatcagcaggcgctgacaatgactcttcatatgccctgcaagacagtgaaagcactaatcaagtgcagtga

SEQ ID NO: 48 - DNA, 564 bp, human Metapneumo virus
atgtctcgtaaggctccatgcaaatatgaagtgcggggcaaatgcaacagagggagtgattgcaaattcaatcacaattactggagttggcctgatagatatttattgttaagatcaaattatctcttaaatcagcttttaagaaacacagataaggctgatggtttgtcaataatatcaggagcaggtagagaagatagaactcaagactttgttcttggttctactaatgtggttcaagggtacattgatgacaaccaaggaataaccaaggctgcagcttgctatagtctacacaacataatcaagcaactacaagaaacagaagtaagacaggctagagacaacaagctttctgatagcaaacatgtggcgctccacaacttgatattatcctatatggagatgagcaaaactcctgcatctctaatcaacaacctaaagaaactaccaagggaaaaactgaagaaattagcaagattaataattgatttatcagcaggaactgacaatgactcttcatatgccttgcaagacagtgaaagcactaatcaagtgcagtaa

SEQ ID NO: 49 - DNA, 564 bp, human Metapneumo virus
atgtctcgcaaagctccatgcaaatatgaagtacggggcaagtgcaacaggggaagtgagtgcaaattcaaccacaattactggagctggcctgataggtatttattgttaagatcaaattatctcttgaatcagcttttaagaaacactgataaggctgatggtttgtcaataatatcaggagcaggtagagaagataggactcaagactttgttcttggttctactaatgtggttcaagggtacattgataacaatcaaggaataacaaaggctgcagcttgctatagtctacataacataataaaacagctacaagaaatagaagtaagacaggctagagataataagctttctgacagcaaacatgtggcacttcacaacttgatattatcctatatggagatgagcaaaactcctgcatccctgattaataacctaaagaaactaccaagagaaaaactgaagaaattagcgaaattaataattgatttatcagcaggaactgataatgactcttcatatgccttgcaagacagtgaaagcactaatcaagtgcagtaa

SEQ ID NO: 50 - protein, 71 aa, human Metapneumo virus
MTLHMPCKTVKALIKCSEHGPVFITIEVDDMIWTHKDLKEALSDGIVKSHTNIYNCYLENIEIIYVKAYLS

SEQ ID NO: 51 - protein, 71 aa, human Metapneumo virus
MTLHMPCKTVKALIKCSEHGPVFITIEVDEMIWTQKELKEALSDGIVKSHTNIYNCYLENIEIIYVKAYLS

SEQ ID NO: 52 - protein, 71 aa, human Metapneumo virus
MTLHMPCKTVKALIKCSKHGPKFITIEADDMIWTHKELKETLSDGIVKSHTNIYSCYLENIEIIYVKTYLS

SEQ ID NO: 53 - protein, 71 aa, human Metapneumo virus
MTLHMPCKTVKALIKCSKHGPKFITIEADDMIWTHKELKETLSDGIVKSHTNIYSCYLENIEIIYVKAYLS

SEQ ID NO: 54 - DNA, 216 bp, human Metapneumo virus
atgactcttcatatgccttgcaagacagtgaaagcactaatcaagtgcagtgagcatggtccagttttcattactatagaggttgatgacatgatatggactcacaaggacttaaaagaagctttatctgatgggatagtgaagtctcatactaacatttacaattgttatttagaaaacatagaaattatatatgtcaaggcttacttaagttag

SEQ ID NO: 55 - DNA, 216 bp, human Metapneumo virus
atgactcttcatatgccctgcaagacagtgaaagcactaatcaagtgcagtgagcatggtcctgttttcattactatagaggttgatgaaatgatatggactcaaaaagaattaaaagaagctttgtccgatgggatagtgaagtctcacaccaacatttacaattgttatttagaaaacatagaaattatatatgtcaaggcttacttaagttag

SEQ ID NO: 56 - DNA, 216 bp, human Metapneumo virus
atgactcttcatatgccttgcaagacagtgaaagcactaatcaagtgcagtaaacatggtcccaaattcattaccatagaggcagatgatatgatatggactcacaaagaattaaaagaaacactgtctgatgggatagtaaaatcacacaccaatatttatagttgttacttagaaaatatagaaataatatatgttaaaacttacttaagttag

SEQ ID NO: 57 - DNA, 216 bp, human Metapneumo virus
atgactcttcatatgccttgcaagacagtgaaagcactaatcaagtgcagtaagcatggtcccaaattcattaccatagaggcagatgatatgatatggacacacaaagaattaaaggagacactgtctgatgggatagtaaaatcacacaccaatatttacagttgttatttagaaaatatagaaataatatatgttaaagcttacttaagttag

SEQ ID NO: 58 - DNA, 727 bp, human Metapneumo virus
atgtctcgcaaggctccgtgcaaatatgaagtgcggggcaaatgcaatagaggaagtgagtgcaagtttaaccacaattactggagttggccagatagatacttattaataagatcaaattatttattaaatcaacttttaaggaacactgatagagctgatggcttatcaataatatcaggagcaggcagagaagataggacacaagattttgtcctaggttccaccaatgtggttcaaggttatattgatgataaccaaagcataacaaaagctgcagcctgttacagtctacataatataatcaaacaactacaagaagttgaagttaggcaggctagagataacaaactatctgacagcaaacatgtagcacttcacaacttagtcctatcttatatggagatgagcaaaactcctgcatctttaatcaacaatctcaagagactgccgagagagaaactgaaaaaattagcaaagctcataattgacttatcagcaggtgctgaaaatgactcttcatatgccttgcaagacagtgaaagcactaatcaagtgcagtgagcatggtccagttttcattactatagaggttgatgacatgatatggactcacaaggacttaaaagaagctttatctgatgggatagtgaagtctcatactaacatttacaattgttatttagaaaacatagaaattatatatgtcaaggcttacttaagttag

SEQ ID NO: 59 - DNA, 727 bp, human Metapneumo virus
atgtctcgcaaggctccatgcaaatatgaagtgcggggcaaatgcaacagaggaagtgagtgtaagtttaaccacaattactggagttggccagatagatacttattaataagatcaaactatctattaaatcagcttttaaggaacactgatagagctgatggcctatcaataatatcaggcgcaggcagagaagacagaacgcaagattttgttctaggttccaccaatgtggttcaaggttatattgatgataaccaaagcataacaaaagctgcagcctgctacagtctacacaacataatcaagcaactacaagaagttgaagttaggcaggctagagatagcaaactatctgacagcaagcatgtggcactccataacttaatcttatcttacatggagatgagcaaaactcccgcatctttaatcaacaatcttaaaagactgccgagagaaaaactgaaaaaattagcaaagctgataattgacttatcagcaggcgctgacaatgactcttcatatgccctgcaagacagtgaaagcactaatcaagtgcagtgagcatggtcctgttttcattactatagaggttgatgaaatgatatggactcaaaaagaattaaaagaagctttgtccgatgggatagtgaagtctcacaccaacatttacaattgttatttagaaaacatagaaattatatatgtcaaggcttacttaagttag

SEQ ID NO: 60 - DNA, 727 bp, human Metapneumo virus
atgtctcgtaaggctccatgcaaatatgaagtgcggggcaaatgcaacagagggagtgattgcaaattcaatcacaattactggagttggcctgatagatatttattgttaagatcaaattatctcttaaatcagcttttaagaaacacagataaggctgatggtttgtcaataatatcaggagcaggtagagaagatagaactcaagactttgttcttggttctactaatgtggttcaagggtacattgatgacaaccaaggaataaccaaggctgcagcttgctatagtctacacaacataatcaagcaactacaagaaacagaagtaagacaggctagagacaacaagctttctgatagcaaacatgtggcgctccacaacttgatattatcctatatggagatgagcaaaactcctgcatctctaatcaacaacctaaagaaactaccaagggaaaaactgaagaaattagcaagattaataattgatttatcagcaggaactgacaatgactcttcatatgccttgcaagacagtgaaagcactaatcaagtgcagtaaacatggtcccaaattcattaccatagaggcagatgatatgatatggactcacaaagaattaaaagaaacactgtctgatgggatagtaaaatcacacaccaatatttatagttgttacttagaaaatatagaaataatatatgttaaaacttacttaagttag

SEQ ID NO: 61 - DNA, 727 bp, human Metapneumo virus
atgtctcgcaaagctccatgcaaatatgaagtacggggcaagtgcaacaggggaagtgagtgcaaattcaaccacaattactggagctggcctgataggtatttattgttaagatcaaattatctcttgaatcagcttttaagaaacactgataaggctgatggtttgtcaataatatcaggagcaggtagagaagataggactcaagactttgttcttggttctactaatgtggttcaagggtacattgataacaatcaaggaataacaaaggctgcagcttgctatagtctacataacataataaaacagctacaagaaatagaagtaagacaggctagagataataagctttctgacagcaaacatgtggcacttcacaacttgatattatcctatatggagatgagcaaaactcctgcatccctgattaataacctaaagaaactaccaagagaaaaactgaagaaattagcgaaattaataattgatttatcagcaggaactgataatgactcttcatatgccttgcaagacagtgaaagcactaatcaagtgcagtaagcatggtcccaaattcattaccatagaggcagatgatatgatatggacacacaaagaattaaaggagacactgtctgatgggatagtaaaatcacacaccaatatttacagttgttatttagaaaatatagaaataatatatgttaaagcttacttaagttag

SEQ ID NO: 62 - protein, 254 aa, human Metapneumo virus
MESYLVDTYQGIPYTAAVQVDLIEKDLLPASLTIWFPLFQANTPPAVLLDQLKTLTITTLYAASQNGPILKVNASAQGAAMSVLPKKFEVNATVALDEYSKLEFDKLTVCEVKTVYLTTMKPYGMVSKFVSSAKSVGKKTHDLIALCDFMDLEKNTPVTIPAFIKSVSIKESESATVEAAISSEADQALTQAKIAPYAGLIMIMTMNNPKGIFKKLGAGTQVIVELGAYVQAESISKICKTWSHQGTRYVLKSR

SEQ ID NO: 63 - protein, 254 aa, human Metapneumo virus
MESYLVDTYQGIPYTAAVQVDLVEKDLLPASLTIWFPLFQANTPPAVLLDQLKTLTITTLYAASQSGPILKVNASAQGAAMSVLPKKFEVNATVALDEYSKLEFDKLTVCEVKTVYLTTMKPYGMVSKFVSSAKSVGKKTHDLIALCDFMDLEKNTPVTIPAFIKSVSIKESESATVEAAISSEADQALTQAKIAPYAGLIMIMTMNNPKGIFKKLGAGTQVIVELGAYVQAESISKICKTWSHQGTRYVLKSS

SEQ ID NO: 64 - protein, 254 aa, human Metapneumo virus
MESYLVDTYQGIPYTAAVQVDLVEKDLLPASLTIWFPLFQANTPPAVLLDQLKTLTITTLYAASQNGPILKVNASAQGAAMSVLPKKFEVNATVALDEYSKLDFDKLTVCDVKTVYLTTMKPYGMVSKFVSSAKSVGKKTHDLIALCDFMDLEKNIPVTIPAFIKSVSIKESESATVEAAISSEADQALTQAKIAPYAGLIMIMTMNNPKGIFKKLGAGTQVIVELGAYVQAESISRICKSWSHQGTRYVLKSR

SEQ ID NO: 65 - protein, 254 aa, human Metapneumo virus; identical to SEQ ID NO: 64

SEQ ID NO: 66 - DNA, 765 bp, human Metapneumo virus
atggagtcctacctagtagacacctatcaaggcattccttacacagcagctgttcaagttgatctaatagaaaaggacctgttacctgcaagcctaacaatatggttccctttgtttcaggccaacacaccaccagcagtgctgctcgatcagctaaaaaccctgacaataaccactctgtatgctgcatcacaaaatggtccaatactcaaagtgaatgcatcagcccaaggtgcagcaatgtctgtacttcccaaaaaatttgaagtcaatgcgactgtagcactcgatgaatatagcaaactggaatttgacaaactcacagtctgtgaagtaaaaacagtttacttaacaaccatgaaaccatacgggatggtatcaaaatttgtgagctcagccaaatcagttggcaaaaaaacacatgatctaatcgcactatgtgattttatggatctagaaaagaacacacctgttacaataccagcattcatcaaatcagtttcaatcaaagagagtgagtcagctactgttgaagctgctataagcagtgaagcagaccaagctctaacacaggccaaaattgcaccttatgcgggattaattatgatcatgactatgaacaatcccaaaggcatattcaaaaagcttggagctgggactcaagtcatagtagaactaggagcatatgtccaggctgaaagcataagcaaaatatgcaagacttggagccatcaagggacaagatatgtcttgaagtccagataa

SEQ ID NO: 67 - DNA, 765 bp, human Metapneumo virus
atggagtcctatctggtagacacttatcaaggcatcccttacacagcagctgttcaagttgatctagtagaaaaggacctgttacctgcaagcctaacaatatggttccccttgtttcaggccaatacaccaccagcagttctgcttgatcagctaaagactctgactataactactctgtatgctgcatcacaaagtggtccaatactaaaagtgaatgcatcagcccagggtgcagcaatgtctgtacttcccaaaaagtttgaagtcaatgcgactgtagcacttgacgaatatagcaaattagaatttgacaaacttacagtctgtgaagtaaaaacagtttacttaacaaccatgaaaccatatgggatggtatcaaagtttgtgagctcggccaaatcagttggcaaaaaaacacatgatctaatcgcattatgtgattttatggatctagaaaagaacacaccagttacaataccagcatttatcaaatcagtttctatcaaggagagtgaatcagccactgttgaagctgcaataagcagtgaagcagaccaagctctaacacaagccaaaattgcaccttatgcgggactgatcatgattatgaccatgaacaatcccaaaggcatattcaagaagcttggagctgggacccaagttatagtagaactaggagcatatgtccaggctgaaagcataagtaaaatatgcaagacttggagccatcaaggaacaagatatgtgctgaagtccagttaa

SEQ ID NO: 68 - DNA, 765 bp, human Metapneumo virus
atggagtcctatctagtagacacttatcaaggcattccatatacagctgctgttcaagttgacctggtagaaaaagatttactgccagcaagtttgacaatatggtttcctttatttcaggccaacacaccaccagcagttctgcttgatcagctaaaaaccttgacaataacaactctgtatgctgcatcacagaatggtccaatactcaaggtaaatgcatctgcccaaggtgctgccatgtctgtacttcccaaaaaattcgaggtaaatgcaactgtagcacttgatgaatacagtaaacttgattttgacaagctgacggtctgcgatgttaaaacagtttatttgacaactatgaaaccgtacgggatggtgtcaaaatttgtgagttcagccaaatcagttggcaaaaagacacatgatctaattgcactatgtgacttcatggacctagagaaaaatatacctgtgacaataccagcattcataaagtcagtttcaatcaaagagagtgaatcagccactgttgaagctgcaataagcagcgaagccgaccaagccttgacacaagccaagattgcgccctatgcaggactaattatgatcatgaccatgaacaatccaaaaggtatattcaagaaactaggggctggaacacaagtgatagtagagctgggggcatatgttcaggctgagagcatcagtaggatctgcaagagctggagtcaccaaggaacaagatacgtactaaaatccagataa

SEQ ID NO: 69 - DNA, 765 bp, human Metapneumo virus
atggagtcctatctagtggacacttatcaaggcattccctacacagctgctgttcaagttgatctggtagaaaaagacttactaccagcaagtttgacaatatggtttcctctattccaagccaacacaccaccagcggttttgctcgatcagctaaaaaccttgactataacaactctgtatgctgcatcacagaatggtccaatactcaaagtaaatgcatcagctcagggtgctgctatgtctgtacttcccaaaaaattcgaagtaaatgcaactgtggcacttgatgaatacagcaaacttgactttgacaagttaacggtttgcgatgttaaaacagtttatttgacaaccatgaagccatatgggatggtgtcaaaatttgtgagttcagccaaatcagttggcaaaaagacacatgatctaattgcactgtgtgacttcatggacctagagaaaaatatacctgtgacaataccagcattcataaagtcagtttcaatcaaagagagtgagtcagccactgttgaagctgcaataagcagtgaggccgaccaagcattaacacaagccaaaattgcaccctatgcaggactaatcatgatcatgaccatgaacaatccaaaaggtatattcaagaaactaggagctggaacacaagtgatagtagagctaggggcatatgttcaagccgagagcatcagcaggatctgcaagagctggagtcaccaaggaacaagatatgtactaaaatccagataa

SEQ ID NO: 70 - protein, 394 aa, human Metapneumo virus
MSLQGIHLSDLSYKHAILKESQYTIKRDVGTTTAVTPSSLQQEITLLCGEILYAKHADYKYAAEIGIQYISTALGSERVQQILRNSGSEVQVVLTRTYSLGKIKNNKGEDLQMLDIHGVEKSWVEEIDKEARKTMATLLKESSGNIPQNQRPSAPDTPIILLCVGALIFTKLASTIEVGLETTVRRANRVLSDALKRYPRMDIPKIARSFYDLFEQKVYHRSLFIEYGKALGSSSTGSKAESLFVNIFMQAYGAGQTMLRWGVIARSSNNIMLGHVSVQAELKQVTEVYDLVREMGPESGLLHLRQSPKAGLLSLANCPNFASVVLGNASGLGIIGMYRGRVPNTELFSAAESYAKSLKESNKINFSSLGLTDEEKEAAEHFLNVSDDSQNDYE

SEQ ID NO: 71 - protein, 394 aa, human Metapneumo virus
MSLQGIHLSDLSYKHAILKESQYTIKRDVGTTTAVTPSSLQQEITLLCGEILYAKHADYKYAAEIGIQYISTALGSERVQQILRNSGSEVQVVLTRTYSLGKVKNNKGEDLQMLDIHGVEKSWVEEIDKEARKTMATLLKESSGNIPQNQRPSAPDTPIILLCVGALIFTKLASTIEVGLETTVRRANRVLSDALKRYPRMDIPKIARSFYDLFEQKVYYRSLFIEYGKALGSSSTGSKAESLFVNIFMQAYGAGQTMLRWGVIARSSNNIMLGHVSVQAELKQVTEVYDLVREMGPESGLLHLRQSPKAGLLSLANCPNFASVVLGNASGLGIIGMYRGRVPNTELFSAAESYAKSLKESNKINFSSLGLTDEEKEAAEHFLNVSDDSQNDYE

SEQ ID NO: 72 - protein, 394 aa, human Metapneumo virus
MSLQGIHLSDLSYKHAILKESQYTIKRDVGTTTAVTPSSLQQEITLLCGEILYTKHTDYKYAAEIGIQYICTALGSERVQQILRNSGSEVQVVLTKTYSLGKGKNSKGEELQMLDIHGVEKSWIEEIDKEARKTMVTLLKESSGNIPQNQRPSAPDTPIILLCVGALIFTKLASTIEVGLETTVRRANRVLSDALKRYPRIDIPKIARSFYELFEQKVYYRSLFIEYGKALGSSSTGSKAESLFVNIFMQAYGAGQTLLRWGVIARSSNNIMLGHVSVQSELKQVTEVYDLVREMGPESGLLHLRQSPKAGLLSLANCPNFASVVLGNASGLGIIGMYRGRVPNTELFSAAESYARSLKESNKINFSSLGLTDEEKEAAEHFLNMSGDNQNDYE

SEQ ID NO: 73 - protein, 394 aa, human Metapneumo virus
MSLQGIHLSDLSYKHAILKESQYTIKRDVGTTTAVTPSSLQQEITLLCGEILYTKHTDYKYAAEIGIQYICTALGSERVQQILRNSGSEVQVVLTKTYSLGKGKNSKGEELQMLDIHGVEKSWVEEIDKEARKTMVTLLKESSGNIPQNQRPSAPDTPIILLCVGALIFTKLASTIEVGLETTVRRANRVLSDALKRYPRVDIPKIARSFYELFEQKVYYRSLFIEYGKALGSSSTGSKAESLFVNIFMQAYGAGQTMLRWGVIARSSNNIMLGHVSVQAELKQVTEVYDLVREMGPESGLLHLRQSPKAGLLSLANCPNFASVVLGNASGLGIIGMYRGRVPNTELFSAAESYARSLKESNKINFSSLGLTDEEKEAAEHFLNMSDDNQDDYE

SEQ ID NO: 74 - DNA, 1185 bp, human Metapneumo virus
atgtctcttcaagggattcacctgagtgatttatcatacaagcatgctatattaaaagagtctcagtacacaataaaaagagatgtgggtacaacaactgcagtgacaccctcatcattgcaacaagaaataacactgttgtgtggagaaattctgtatgctaaacatgctgactacaaatatgctgcagaaataggaatacaatatattagcacagctttaggatcagagagagtgcagcagattctgaggaactcaggcagtgaagtccaagtggtcttaaccagaacgtactctctggggaaaattaaaaacaataaaggagaagatttacagatgttagacatacacggggtagagaagagctgggtagaagagatagacaaagaagcaaggaaaacaatggcaaccttgcttaaggaatcatcaggtaatatcccacaaaatcagaggccctcagcaccagacacacccataatcttattatgtgtaggtgccttaatattcactaaactagcatcaaccatagaagtgggactagagaccacagtcagaagggctaaccgtgtactaagtgatgcactcaagagataccctagaatggacataccaaagattgccagatccttctatgacttatttgaacaaaaagtgtatcacagaagtttgttcattgagtatggcaaagcattaggctcatcatctacaggcagcaaagcagaaagtctatttgttaatatattcatgcaagcttatggggccggtcaaacaatgctaaggtggggggtcattgccaggtcatccaacaatataatgttaggacatgtatccgtccaagctgagttaaaacaggtcacagaagtctatgacttggtgcgagaaatgggccctgaatctggacttctacatttaaggcaaagcccaaaagctggactgttatcactagccaactgtcccaactttgcaagtgttgttctcggaaatgcctcaggcttaggcataatcggtatgtatcgagggagagtaccaaacacagaattattttcagcagctgaaagttatgccaaaagtttgaaagaaagcaataaaataaatttctcttcattaggacttacagatgaagagaaagaggctgcagaacatttcttaaatgtgagtgacgacagtcaaaatgattatgagtaa

SEQ ID NO: 75 - DNA, 1185 bp, human Metapneumo virus
atgtctcttcaagggattcacctgagtgatctatcatacaagcatgctatattaaaagagtctcagtatacaataaagagagatgtaggcacaacaaccgcagtgacaccctcatcattgcaacaagaaataacactattgtgtggagaaattctatatgctaagcatgctgattacaaatatgctgcagaaataggaatacaatatattagcacagctctaggatcagagagagtacagcagattctaagaaactcaggtagtgaagtccaagtggttttaaccagaacgtactccttggggaaagttaaaaacaacaaaggagaagatttacagatgttagacatacacggagtagagaaaagctgggtggaagagatagacaaagaagcaagaaaaacaatggcaactttgcttaaagaatcatcaggcaatattccacaaaatcagaggccttcagcaccagacacacccataatcttattatgtgtaggtgccttaatatttaccaaactagcatcaactatagaagtgggattagagaccacagtcagaagagctaaccgtgtactaagtgatgcactcaaaagataccctaggatggacataccaaaaatcgctagatctttctatgacttatttgaacaaaaagtgtattacagaagtttgttcattgagtatggcaaagcattaggctcatcctctacaggcagcaaagcagaaagtttattcgttaatatattcatgcaagcttacggtgctggtcaaacaatgctgaggtggggagtcattgccaggtcatctaacaatataatgttaggacatgtatctgttcaagctgagttaaaacaagtcacagaagtctatgacctggtgcgagaaatgggccctgaatctgggctcctacatttaaggcaaagcccaaaagctggactgttatcactagccaattgtcccaactttgctagtgttgttctcggcaatgcctcaggcttaggcataataggtatgtatcgcgggagagtgccaaacacagaactattttcagcagcagaaagctatgccaagagtttgaaagaaagcaataaaattaacttttcttcattaggactcacagatgaagaaaaagaggctgcagaacacttcctaaatgtgagtgacgacagtcaaaatgattatgagtaa

SEQ ID NO: 76 - DNA, 1185 bp, human Metapneumo virus
atgtctcttcaagggattcacctaagtgatctatcatataaacatgctatattaaaagagtctcaatacacaataaaaagagatgtaggcaccacaactgcagtgacaccttcatcattacaacaagaaataacacttttgtgtggggaaatactttacactaaacacactgattacaaatatgctgctgagataggaatacaatatatttgcacagctctaggatcagaaagagtacaacagattttgagaaactcaggtagtgaagttcaggtggttctaaccaaaacatactccttagggaaaggcaaaaacagtaaaggggaagagctgcagatgttagatatacatggagtggaaaagagttggatagaagaaatagacaaagaggcaagaaagacaatggtaactttgcttaaggaatcatcaggtaacatcccacaaaaccagagaccttcagcaccagacacaccaataattttattatgtgtaggtgccctaatattcactaaactagcatcaacaatagaagttggattagagactacagttagaagagctaatagagtgctaagtgatgcactcaaaagatacccaaggatagatataccaaagattgctagatctttttatgaactatttgaacaaaaagtgtactacagaagtttattcattgagtacggaaaagctttaggctcatcttcaacaggaagcaaagcagaaagtttgtttgtaaatatatttatgcaagcttatggagctggccaaacactgctaaggtggggtgtcattgccagatcatccaacaacataatgctagggcatgtatctgtgcaatctgaattgaagcaagttacagaggtttatgacttggtgagagaaatgggtcctgaatctgggcttttacatctaagacaaagtccaaaggcagggctgttatcattggccaattgccccaattttgctagtgttgttcttggcaatgcttcaggtctaggcataatcggaatgtacagagggagagtaccaaacacagagctattttctgcagcagaaagttatgccagaagcttaaaagaaagcaataaaatcaacttctcttcgttagggcttacagatgaagaaaaagaagctgcagaacacttcttaaacatgagtggtgacaatcaaaatgattatgagtaa

SEQ ID NO: 77 - DNA, 1185 bp, human Metapneumo virus
atgtctcttcaagggattcacctaagtgatctgtcatataaacatgctatattaaaagagtctcaatacacaataaaaagagatgtaggcaccacaactgcagtgacaccttcatcattgcagcaagagataacacttttgtgtggagagattctttacactaaacatactgattacaaatatgctgcagagatagggatacaatatatttgcacagctctaggatcagaaagagtacaacagattttaagaaattcaggtagtgaggttcaggtggttctaaccaagacatactctttagggaaaggtaaaaatagtaaaggggaagagttgcaaatgttagatatacatggagtggaaaagagttgggtagaagaaatagacaaagaggcaagaaaaacaatggtgactttgctaaaggaatcatcaggcaacatcccacaaaaccagaggccttcagcaccagacacaccaataattttattgtgtgtaggtgctttaatattcactaaactagcatcaacaatagaagttggactagagactacagttagaagggctaacagagtgttaagtgatgcgctcaaaagataccctagggtagatataccaaagattgctagatctttttatgaactatttgagcagaaagtgtattacaggagtctattcattgagtatgggaaagctttaggctcatcttcaacaggaagcaaagcagaaagtttgtttgtaaatatatttatgcaagcttatggagccggtcagacaatgctaaggtggggtgtcattgccagatcatctaacaacataatgctagggcatgtatctgtgcaagctgaattgaaacaagttacagaggtttatgatttggtaagagaaatgggtcctgaatctgggcttttacatctaagacaaagtccaaaggcaggactgttatcgttggctaattgccccaattttgctagtgttgttcttggtaatgcttcaggtctaggtataatcggaatgtacaggggaagagtgccaaacacagagctattttctgcagcagaaagttatgccagaagcttaaaagaaagcaacaaaatcaacttctcctcattagggctcacagacgaagaaaaagaagctgcagaacacttcttaaacatgagtgatgacaatcaagatgattatgagtaa

SEQ ID NO: 78 - protein, 294 aa, human Metapneumo virus
MSFPEGKDILFMGNEAAKLAEAFQKSLRKPGHKRSQSIIGEKVNTVSETLELPTISRPAKPTIPSEPKLAWTDKGGATKTEIKQAIKVMDPIEEEESTEKKVLPSSDGKTPAEKKLKPSTNTKKKVSFTPNEPGKYTKLEKDALDLLSDNEEEDAESSILTFEERDTSSLSIEARLESIEEKLSMILGLLRTLNIATAGPTAARDGIRDAMIGVREELIADIIKEAKGKAAEMMEEEMSQRSKIGNGSVKLTEKAKELNKIVEDESTSGESEEEEEPKDTQDNSQEDDIYQLIM

SEQ ID NO: 79 - protein, 294 aa, human Metapneumo virus
MSFPEGKDILFMGNEAAKLAEAFQKSLRKPNHKRSQSIIGEKVNTVSETLELPTISRPTKPTILSEPKLAWTDKGGAIKTEAKQTIKVMDPIEEEEFTEKRVLPSSDGKTPAEKKLKPSTNTKKKVSFTPNEPGKYTKLEKDALDLLSDNEEEDAESSILTFEERDTSSLSIEARLESIEEKLSMILGLLRTLNIATAGPTAARDGIRDAMIGIREELIADIIKEAKGKAAEMMEEEMNQRTKIGNGSVKLTEKAKELNKIVEDESTSGESEEEEEPKDTQENNQEDDIYQLIM

SEQ ID NO: 80 - protein, 294 aa, human Metapneumo virus
MSFPEGKDILFMGNEAAKIAEAFQKSLKKSGHKRTQSIVGEKVNTISETLELPTISKPARSSTLLEPKLAWADNSGITKITEKPATKTTDPVEEEEFNEKKVLPSSDGKTPAEKKSKFSTSVKKKVSFTSNEPGKYTKLEKDALDLLSDNEEEDAESSILTFEEKDTSSLSIEARLESIEEKLSMILGLLRTLNIATAGPTAARDGIRDAMIGIREELIAEIIKEAKGKAAEMMEEEMNQRSKIGNGSVKLTEKAKELNKIVEDESTSGESEEEEEPKETQDNNQGEDIYQLIM

SEQ ID NO: 81 - protein, 294 aa, human Metapneumo virus
MSFPEGKDILFMGNEAAKIAEAFQKSLKRSGHKRTQSIVGEKVNTISETLELPTISKPARSSTLLEPKLAWADSSGATKTTEKQTTKTTDPVEEEELNEKKVSPSSDGKTPAEKKSKSPTNVKKKVSFTSNEPGKYTKLEKDALDLLSDNEEEDAESSILTFEERDTSSLSIEARLESIEEKLSMILGLLRTLNIATAGPTAARDGIRDAMIGIREELIAEIIKEAKGKAAEMMEEEMNQRSKIGNGSVKLTEKAKELNKIVEDESTSGESEEEEEPKETQDNNQGEDIYQLIM

SEQ ID NO: 82 - DNA, 885 bp, human Metapneumo virus
atgtcattccctgaaggaaaagatattcttttcatgggtaatgaagcagcaaaattagcagaagctttccagaaatcattaagaaaaccaggtcataaaagatctcaatctattataggagaaaaagtgaatactgtatcagaaacattggaattacctactatcagtagacctgcaaaaccaaccataccgtcagaaccaaagttagcatggacagataaaggtggggcaaccaaaactgaaataaagcaagcaatcaaagtcatggatcccattgaagaagaagagtctaccgagaagaaggtgctaccctccagtgatgggaaaacccctgcagaaaagaaactgaaaccatcaactaacaccaaaaagaaggtttcatttacaccaaatgaaccagggaaatatacaaagttggaaaaagatgctctagatttgctctcagataatgaagaagaagatgcagaatcttcaatcttaacctttgaagaaagagatacttcatcattaagcattgaggccagattggaatcaatagaggagaaattaagcatgatattagggctattaagaacactcaacattgctacagcaggacccacagcagcaagagatgggatcagagatgcaatgattggcgtaagagaggaattaatagcagacataataaaggaagctaaagggaaagcagcagaaatgatggaagaggaaatgagtcaacgatcaaaaataggaaatggtagtgtaaaattaacagaaaaagcaaaagagctcaacaaaattgttgaagatgaaagcacaagtggagaatccgaagaagaagaagaaccaaaagacacacaagacaatagtcaagaagatgacatttaccagttaattatgtag

SEQ ID NO: 83 - DNA, 885 bp, human Metapneumo virus
atgtcattccctgaaggaaaagatattcttttcatgggtaatgaagcagcaaaattggcagaagcttttcaaaaatcattaagaaaacctaatcataaaagatctcaatctattataggagaaaaagtgaacactgtatctgaaacattggaattacctactatcagtagacctaccaaaccgaccatattgtcagagccgaagttagcatggacagacaaaggtggggcaatcaaaactgaagcaaagcaaacaatcaaagttatggatcctattgaagaagaagagtttactgagaaaagggtgctgccctccagtgatgggaaaactcctgcagaaaagaagttgaaaccatcaaccaacactaaaaagaaggtctcatttacaccaaatgaaccaggaaaatacacaaagttggagaaagatgctctagacttgctttcagacaatgaagaagaagatgcagaatcctcaatcttaaccttcgaagaaagagatacttcatcattaagcattgaagccagactagaatcgattgaggagaaattaagcatgatattagggctattaagaacactcaacattgctacagcaggacccacagcagcaagagatgggatcagagatgcaatgattggcataagggaggaactaatagcagacataataaaagaagccaagggaaaagcagcagaaatgatggaagaagaaatgaaccagcggacaaaaataggaaacggtagtgtaaaattaactgaaaaggcaaaggagctcaacaaaattgttgaagacgaaagcacaagtggtgaatccgaagaagaagaagaaccaaaagacacacaggaaaataatcaagaagatgacatttaccagttaattatgtag

SEQ ID NO: 84 - DNA, 885 bp, human Metapneumo virus
atgtcattccctgaaggaaaggatattctgttcatgggtaatgaagcagcaaaaatagccgaagctttccagaaatcactgaaaaaatcaggtcacaagagaactcaatctattgtaggggaaaaagttaacactatatcagaaactctagaactacctaccatcagcaaacctgcacgatcatctacactgctggaaccaaaattggcatgggcagacaacagcggaatcaccaaaatcacagaaaaaccagcaaccaaaacaacagatcctgttgaagaagaggaattcaatgaaaagaaagtgttaccttccagtgatgggaagactcctgcagagaaaaaatcaaagttttcaaccagtgtaaaaaagaaagtttcctttacatcaaatgaaccagggaaatacaccaaactagagaaagatgccctagatttgctctcagacaatgaggaagaagacgcagaatcctcaatcctaacttttgaggagaaagatacatcatcactaagcattgaagctagactagaatctatagaagagaagttgagcatgatattaggactgcttcgtacacttaacattgcaacagcaggaccaacagctgcacgagatggaattagggatgcaatgattggtataagagaagagctaatagcagagataattaaggaagccaagggaaaagcagctgaaatgatggaagaagagatgaatcaaagatcaaaaataggaaatggcagtgtaaaactaaccgagaaggcaaaagagctcaacaaaattgttgaagacgagagcacaagcggtgaatcagaagaagaagaagaaccaaaagaaactcaggataacaatcaaggagaagatatttatcagttaatcatgtag

SEQ ID NO: 85 - DNA, 885 bp, human Metapneumo virus
atgtcattccctgaaggaaaagatatcctgttcatgggtaatgaagcagcaaaaatagcagaagctttccagaaatcactaaaaagatcaggtcacaaaagaacccagtctattgtaggggaaaaagtaaacactatatcagaaactctagagctacctaccatcagcaaacctgcacgatcatctacactgctagagccaaaattggcatgggcagacagcagcggagccaccaaaaccacagaaaaacaaacaaccaaaacaacagatcctgttgaagaagaggaactcaatgaaaagaaggtatcaccttccagtgatgggaagactcctgcagagaaaaaatcaaaatctccaaccaatgtaaaaaagaaagtttccttcacatcaaatgaaccagggaaatatactaaactagaaaaagatgccctagatttgctctcagacaatgaggaagaagacgcagagtcctcaatcctaacctttgaagagagagacacatcatcactaagcattgaggctagactagaatcaatagaagagaagctaagcatgatattaggactgcttcgtacacttaacattgcaacagcaggaccaacggctgcaagggatggaatcagagatgcaatgattggtataagagaagaactaatagcagaaataataaaagaagcaaagggaaaagcagccgaaatgatggaagaggaaatgaatcaaaggtcaaaaataggtaatggcagtgtaaaactaaccgagaaggcaaaagaacttaataaaattgttgaagacgagagcacaagtggtgaatcagaagaagaagaagaaccaaaagaaactcaggataacaatcaaggagaagatatctaccagttaatcatgtag

SEQ ID NO: 86 - protein, 183 aa, human Metapneumo virus
MITLDVIKSDGSSKTCTHLKKIIKDHSGKVLIVLKLILALLTFLTVTITINYIKVENNLQICQSKTESDKKDSSSNTTSVTTKTTLNHDITQYFKSLIQRYTNSAINSDTCWKINRNQCTNITTYKFLCFKSEDTKTNNCDKLTDLCRNKPKPAVGVYHIVECHCIYTVKWKCYHYPTDETQS

SEQ ID NO: 87 - protein, 179 aa, human Metapneumo virus
MITLDVIKSDGSSKTCTHLKKIIKDHSGKVLIALKLILALLTFFTITITINYIKVENNLQICQSKTESDKEDSPSNTTSVTTKTTLDHDITQYFKRLIQRYTDSVINKDTCWKISRNQCTNITTYKFLCFKPEDSKINSCDRLTDLCRNKSKSAAEAYHTVECHCIYTIEWKCYHHPID

SEQ ID NO: 88 - protein, 177 aa, human Metapneumo virus
MKTLDVIKSDGSSETCNQLKKIIKKHSGKVLIALKLILALLTFFTATITVNYIKVENNLQACQPKNESDKKVTKPNTTSTTIRPTPDPTVVHHLKRLIQRHTNSVTKDSDTCWRIHKNQRTNIKIYKFLCSGFTNSKGTDCEEPTALCDKKLKTIVEKHRKAECHCLHTTEWGCLHP

SEQ ID NO: 89 - protein, 177 aa, human Metapneumo virus
MKTLDVIKSDGSSETCNQLKKIIKKHSGKLLIALKLILALLTFFTVTITVNYIKVENNLQACQLKNESDKKDTKLNTTSTTIRPIPDLNAVQYLKRLIQKHTNFVIKDRDTCWRIHTNQCTNIKIYKFLCFGFMNSTNTDCEELTVLCDKKSKTMTEKHRKAECHCLHTTEWWCYYL

SEQ ID NO: 90 - DNA, 552 bp, human Metapneumo virus
atgataacattagatgtcattaaaagtgatgggtcttcaaaaacatgtactcacctcaaaaaaataattaaagaccactctggtaaagtgcttattgtacttaagttaatattagctttactaacatttctcacagtaacaatcaccatcaattatataaaagtggaaaacaatctgcaaatatgccagtcaaaaactgaatcagacaaaaaggactcatcatcaaataccacatcagtcacaaccaagactactctaaatcatgatatcacacagtattttaaaagtttgattcaaaggtatacaaactctgcaataaacagtgacacatgctggaaaataaacagaaatcaatgcacaaatataacaacatacaaatttttatgttttaaatctgaagacacaaaaaccaacaattgtgataaactgacagatttatgcagaaacaaaccaaaaccagcagttggagtgtatcacatagtagaatgccattgtatatacacagttaaatggaagtgctatcattacccaaccgatgaaacccaatcctaa

SEQ ID NO: 91 - DNA, 540 bp, human Metapneumo virus
atgataacattagatgtcattaaaagtgatgggtcttcaaaaacatgtactcacctcaaaaaaataatcaaagaccattctggtaaagtgcttattgcacttaagttaatattagctttactaacatttttcacaataacaatcactataaattacataaaagtagaaaacaatctacaaatatgccagtcaaaaactgaatcagacaaagaagactcaccatcaaataccacatccgtcacaaccaagactactctagaccatgatataacacagtattttaaaagattaattcaaaggtatacagattctgtgataaacaaggacacatgctggaaaataagcagaaatcaatgcacaaatataacaacatataaatttttatgctttaaacctgaggactcaaaaatcaacagttgtgatagactgacagatctatgcagaaacaaatcaaaatcagcagctgaagcatatcatacagtagaatgccattgcatatacacaattgagtggaagtgctatcaccacccaatagattaa

SEQ ID NO: 92 - DNA, 534 bp, human Metapneumo virus
atgaaaacattagatgtcataaaaagtgatggatcctcagaaacgtgtaatcaactcaaaaaaataataaaaaaacactcaggtaaagtgcttattgcactaaaactgatattggccttactgacatttttcacagcaacaatcactgtcaactatataaaagtagaaaacaatttgcaggcatgtcaaccaaaaaatgaatcagacaaaaaggtcacaaagccaaataccacatcaacaacaatcagacccacacccgatccaactgtagtacatcatttgaaaaggctgattcagagacacaccaactctgtcacaaaagacagcgatacttgttggagaatacacaagaatcaacgtacaaatataaaaatatacaagttcttatgctctgggttcacaaattcaaaaggtacagattgtgaggaaccaacagccctatgcgacaaaaagttaaaaaccatagtagaaaaacatagaaaagcagaatgtcactgtctacatacaaccgagtgggggtgccttcatccctaa

SEQ ID NO: 93 - DNA, 534 bp, human Metapneumo virus
atgaaaacattagatgtcataaaaagtgatggatcctcagaaacatgtaatcaactcaaaaaaataataaaaaaacactcaggtaaattgcttattgcattaaaactgatattggccttattgacgtttttcacagtaacaattactgttaactatataaaagtagaaaacaatttgcaggcatgtcaattaaaaaatgaatcagacaaaaaggacacaaagctaaataccacatcaacaacaatcagacccattcctgatctaaatgcagtacagtacttgaaaaggctgattcagaaacacaccaactttgtcataaaagacagagatacctgttggagaatacacacgaatcaatgcacaaatataaaaatatataagttcttatgtttcgggtttatgaattcaacaaatacagactgtgaagaactaacagttttatgtgataaaaagtcaaaaaccatgacagaaaaacataggaaagcagagtgtcactgtctacatacaaccgagtggtggtgttattatctttaa

SEQ ID NO: 94 - DNA, 13294 bp, human metapneumo virus
  misc_feature (0)...(0): human MPV protein
acgcgaaaaaaacgcgtataaattaaattccaaacaaaacgggacaaataaaaatgtctcttcaagggattcacctaagtgatctatcatataaacatgctatattaaaagagtctcaatacacaataaaaagagatgtaggcaccacaactgcagtgacaccttcatcattacaacaagaaataacacttttgtgtggggaaatactttacactaaacacactgattacaaatatgctgctgagataggaatacaatatatttgcacagctctaggatcagaaagagtacaacagattttgagaaactcaggtagtgaagttcaggtggttctaaccaaaacatactccttagggaaaggcaaaaacagtaaaggggaagagctgcagatgttagatatacatggagtggaaaagagttggatagaagaaatagacaaagaggcaagaaagacaatggtaactttgcttaaggaatcatcaggtaacatcccacaaaaccagagaccttcagcaccagacacaccaataattttattatgtgtaggtgccctaatattcactaaactagcatcaacaatagaagttggattagagactacagttagaagagctaatagagtgctaagtgatgcactcaaaagatacccaaggatagatataccaaagattgctagatctttttatgaactatttgaacaaaaagtgtactacagaagtttattcattgagtacggaaaagctttaggctcatcttcaacaggaagcaaagcagaaagtttgtttgtaaatatatttatgcaagcttatggagctggccaaacactgctaaggtggggtgtcattgccagatcatccaacaacataatgctagggcatgtatctgtgcaatctgaattgaagcaagttacagaggtttatgacttggtgagagaaatgggtcctgaatctgggcttttacatctaagacaaagtccaaaggcagggctgttatcattggccaattgccccaattttgctagtgttgttcttggcaatgcttcaggtctaggcataatcggaatgtacagagggagagtaccaaacacagagctattttctgcagcagaaagttatgccagaagcttaaaagaaagcaataaaatcaacttctcttcgttagggcttacagatgaagaaaaagaagctgcagaacacttcttaaacatgagtggtgacaatcaagatgattatgagtaattaaaaaactgggacaagtcaaaatgtcattccctgaaggaaaggatattctgttcatgggtaatgaagcagcaaaaatagccgaagctttccagaaatcactgaaaaaatcaggtcacaagagaactcaatctattgtaggggaaaaagttaacactatatcagaaactctagaactacctaccatcagcaaacctgcacgatcatctacactgctggaaccaaaattggcatgggcagacaacagcggaatcaccaaaatcacagaaaaaccagcaaccaaaacaacagatcctgttgaagaagaggaattcaatgaaaagaaagtgttaccttccagtgatgggaagactcctgcagagaaaaaatcaaagttttcaaccagtgtaaaaaagaaagtttcctttacatcaaatgaaccagggaaatacaccaaactagagaaagatgccctagatttgctctcagacaatgaggaagaagacgcagaatcctcaatcctaacttttgaggagaaagatacatcatcactaagcattgaagctagactagaatctatagaagagaagttgagcatgatattaggactgcttcgtacacttaacattgcaacagcaggaccaacagctgcacgagatggaattagggatgcaatgattggtataagagaagagctaatagcagagataattaaggaagccaagggaaaagcagctgaaatgatggaagaagagatgaatcaaagatcaaaaataggaaatggcagtgtaaaactaaccgagaaggcaaaagagctcaacaaaattgttgaagacgagagcacaagcggtgaatcagaagaagaagaagaaccaaaagaaactcaggataacaatcaaggagaagatatttatcagttaatcatgtagtttaataaaaataaacaatgggacaagtcaagatggagtcctatctagtagacacttatcaaggcattccatatacagctgctgttcaagttgacctggtagaaaaagatttactgccagcaagtttgacaatatggtttcctttatttcaggccaacacaccaccagcagttctgcttgatcagctaaaaaccctgacaataaccactctgtatgctgcatcacagaatggtccaatactcaaggtaaatgcatctgcccaaggtgctgccatgtctgtacttcccaaaaaattcgaggtaaatgcaactgtagcacttgatgaatacagtaaacttgattttgacaagctgacggtctgcgatgttaaaacagtttatttgacaactatgaaaccgtacgggatggtgtcaaaatttgtgagttcagccaaatcagttggcaaaaagacacatgatctaattgcactatgtgacttcatggacctagagaaaaatatacctgtgacaataccagcattcataaagtcagtttcaatcaaagagagtgaatcagccactgttgaagctgcaataagcagcgaagccgaccaagccttgacacaagccaagattgcgccctatgcaggactaattatgatcatgaccatgaacaatccaaaaggtatattcaagaaactaggggctggaacacaagtgatagtagagctgggggcatatgttcaggctgagagcatcagtaggatctgcaagagctggagtcaccaaggaacaagatacgtactaaaatccagataaaaataactgtcttaatcaataattgcttatataactctagagattaataagcttattattatagttatataaaaataaattagaattagaagggcatcaatagaaagcgggacaaataaaaatgtcttggaaagtgatgatcatcatttcgttactcataacaccccagcacgggctaaaggagagttatttggaagaatcatgtagtactataactgagggatacctcagtgttttaagaacaggctggtacactaatgtcttcacattagaagttggtgatgttgaaaatcttacatgtactgatggacctagcttaatcaaaacagaacttgatctaacaaaaagtgctttaagggaactcaaaacagtctctgctgatcagttggcgagagaggagcaaattgaaaatcccagacaatcaagatttgtcttaggtgcgatagctctcggagttgctacagcagcagcagtcacagcaggcattgcaatagccaaaaccataaggcttgagagtgaggtgaatgcaattaaaggtgctctcaaacaaactaatgaagcagtatccacattagggaatggtgtgcgggtcctagccactgcagtgagagagctaaaagaatttgtgagcaaaaacctgactagtgcaatcaacaggaacaaatgtgacattgctgatctgaagatggctgtcagcttcagtcaattcaacagaagatttctaaatgttgtgcggcagttttcagacaatgcagggataacaccagcaatatcattggacctgatgactgatgctgagttggccagagctgtatcatacatgccaacatctgcagggcagataaaactgatgttggagaaccgcgcaatggtaaggagaaaaggatttggaatcctgataggggtctacggaagctctgtgatttacatggttcaattgccgatctttggtgtcatagatacaccttgttggatcatcaaggcagctccctcttgctcagaaaaaaacgggaattatgcttgcctcctaagagaggatcaagggtggtattgtaaaaatgcaggatctactgtttactacccaaatgaaaaagactgcgaaacaagaggtgatcatgttttttgtgacacagcagcagggatcaatgttgctgagcaatcaagagaatgcaacatcaacatatctactaccaactacccatgcaaagtcagcacaggaagacaccctataagcatggttgcactatcacctctcggtgctttggtggcttgctataaaggggtaagctgctcgattggcagcaattgggttggaatcatcaaacaattacccaaaggctgctcatacataaccaaccaggatgcagacactgtaacaattgacaataccgtgtatcaactaagcaaagttgaaggtgaacagcatgtaataaaagggagaccagtttcaagcagttttgatccaatcaagtttcctgaggatcagttcaatgttgcgcttgatcaagtcttcgaaagcattgagaacagtcaggcactagtggaccagtcaaacaaaattctaaacagtgcagaaaaaggaaacactggtttcattatcgtagtaattttggttgctgttcttggtctaaccatgatttcagtgagcatcatcatcataatcaagaaaacaaggaagcccacaggagcacctccagagctgaatggtgtcaccaacggcggtttcataccacatagttagttaattaaaaaatgggacaaatcatcatgtctcgtaaggctccatgcaaatatgaagtgcggggcaaatgcaacagagggagtgattgcaaattcaatcacaattactggagttggcctgatagatatttattgttaagatcaaattatctcttaaatcagcttttaagaaacacagataaggctgatggtttgtcaataatatcaggagcaggtagagaagatagaactcaagactttgttcttggttctactaatgtggttcaagggtacattgatgacaaccaaggaataaccaaggctgcagcttgctatagtctacacaacataatcaagcaactacaagaaacagaagtaagacaggctagagacaacaagctttctgatagcaaacatgtggcgctccacaacttgatattatcctatatggagatgagcaaaactcctgcatctctaatcaacaacctaaagaaactaccaagggaaaaactgaagaaattagcaagattaataattgatttatcagcaggaactgacaatgactcttcatatgccttgcaagacagtgaaagcactaatcaagtgcagtaaacatggtcccaaattcattaccatagaggcagatgatatgatatggactcacaaagaattaaaagaaacactgtctgatgggatagtaaaatcacacaccaatatttatagttgttacttagaaaatatagaaataatatatgttaaaacttacttaagttagtaaaaaataaaaatagaatgggataaatgacaatgaaaacattagatgtcataaaaagtgatggatcctcagaaacgtgtaatcaactcaaaaaaataataaaaaaacactcaggtaaagtgcttattgcactaaaactgatattggccttactgacatttttcacagcaacaatcactgtcaactatataaaagtagaaaacaatttgcaggcatgtcaaccaaaaaatgaatcagacaaaaaggtcacaaagccaaataccacatcaacaacaatcagacccacacccgatccaactgtagtacatcatttgaaaaggctgattcagagacacaccaactctgtcacaaaagacagcgatacttgttggagaatacacaagaatcaacgtacaaatataaaaatatacaagttcttatgctctgggttcacaaattcaaaaggtacagattgtgaggaaccaacagccctatgcgacaaaaagttaaaaaccatagtagaaaaacatagaaaagcagaatgtcactgtctacatacaaccgagtgggggtgccttcatccctaaaataacacggctttcaacattaaaatcagaacaacctccacccaggtctatcaatacagtggtttagccatttaaaaaccgaatattatctaggctgcacgacactttgcaataatatgcaatagtcaatagttaaaccactgctgcaaactcatccataatataatcactgagtaatacaaaatcaagaaaatgggacaagtggctatggaagtaagagtggagaacattcgagcgatagacatgttcaaagcaaagataaaaaaccgtataagaagcagcaggtgctatagaaatgctacactgatccttattggactaacagcgttaagcatggcacttaatattttcctgatcatcgatcatgcaacattaagaaacatgatcaaaacagaaaactgtgctaacatgccgtcggcagaaccaagcaaaaagaccccaatgacctccacagcaggcccaaacaccaaacccaatccacagcaagcaacacagtggaccacagagaactcaacatccccagtagcaaccccagagggccatccatacacagggacaactcaaacatcagacacaacagctccccagcaaaccacagacaaacacacagcaccgctaaaatcaaccaatgaacagatcacccagacaaccacagagaaaaagacaatcagagcaacaacccaaaaaagggaaaaaggaaaagaaaacacaaaccaaaccacaagcacagctgcaacccaaacaaccaacaccaccaaccaaatcagaaatgcaagtgagacaatcacaacatccgacagacccagaactgacaccacaacccaaagcagcgaacagacaacccgggcaacagacccaagctccccaccacaccatgcatagagaggtgcaaaactcaaatgagcacaacacacaaacatcccatccaagtagttaacaaaaaaccacaaaataaccttgaaaaccaaaaaaccaaaacataaacccagacccagaaaaacatagacaccatatggaaggttctagcatatgcaccaatgagatggcatctgttcatgtatcaatagcaccaccatcattcaaggaataagaagaggcgaaaatttaagggataaatgacaatggatcccttttgtgaatctactgttaatgtttatctccctgattcatatctcaaaggagtaatatcttttagtgaaaccaatgcaattggatcatgtcttttgaaaagaccctatctaaaaaatgacaacactgccaaagttgctgtagaaaaccctgttgttgaacatgtgaggcttagaaatgcagtcatgaccaaaatgaagatatcagattataaagtggttgaaccagttaatatgcagcatgaaataatgaaaaatatacatagttgtgagcttacattattaaaacaattcttaacgagaagcaaaaacattagctctctaaaattaaatatgatatgtgattggttacagttaaaatccacttcagataacacatcaattctcaattttatagatgtggagttcatacccgtttgggtaagcaattggttcagtaactggtataatctcaataaattaatcttagagtttagaagagaagaagtaataagaactggttcaattttatgtagatcactaggcaagttagtttttattgtatcatcttatggatgtgtagtaaaaagcaacaaaagtaaaagagtgagctttttcacctataaccaactgttaacatggaaagatgtgatgttaagtagattcaatgcaaacttttgtatatgggtaagtaacaacctgaacaaaaatcaagaaggactaggacttagaagcaatctgcaaggtatgttaaccaataaattatatgaaactgttgattacatgctaagcctatgctgcaatgaaggattctctctggtgaaagagtttgaaggatttattatgagtgaaattctaaaaattactgagcatgctcagttcagtactaggtttaggaatactttattgaatgggttaactgaacaattatcagtgttgaaagctaagaacagatctagagttcttggaactatattagaaaacaacaattaccctatgtacgaagtagtacttaaattattaggggacaccttgaaaagcataaagttattaattaacaagaatttagaaaatgctgcagaattatattatatattcagaatttttggacaccctatggtagatgagagggaagcaatggatgctgttaaattaaacaatgagattacaaaaattcttaaattagagagtttaacagaactaagaggagcatttatactaagaattataaaagggtttgtagacaataataaaagatggcctaaaattaagaatttaaaagtgctcagcaaaagatgggctatgtatttcaaagctaaaagttaccctagccaacttgagctaagtgtacaagattttttagaacttgctgcagtacaatttgagcaggaattctctgtacctgaaaaaaccaaccttgagatggtattaaatgataaagcaatatcacctccaaaaaagctaatatggtctgtatatccaaaaaactacctgcctgaaactataaaaaatcaatatttagaagaggctttcaatgcaagtgacagccaaagaacaaggagagtcttagaattttacttaaaagattgtaaatttgatcaaaaagaacttaaacgttatgtaattaaacaagagtatctgaatgacaaagaccacattgtctcgttaactgggaaggaaagagaattaagtgtaggtaggatgtttgcaatgcaaccaggaaaacaaagacagatacagatattagctgagaaacttctagctgataatattgtaccttttttcccagaaactttaacaaagtatggtgacttagatctccaaagaattatggaaataaaatcagaactttcttccattaaaactagaaagaatgatagctacaacaattatattgcaagggcctctatagtaacagacttaagtaagttcaatcaggcctttagatatgaaaccacagctatatgtgcagatgtagctgatgagttacatgggacacaaagcttattctgttggttacatcttattgttcccatgactacaatgatatgtgcatacagacatgcaccaccagaaacaaaaggggaatatgatatagacaaaatacaagagcaaagcggattatacagatatcatatgggagggattgaagggtggtgccagaagttatggacaatggaagcaatatccttgttagatgtagtatctgtgaagactcgctgtcagatgacctctctattaaacggagacaatcagtcaatagatgttagtaaaccagtaaaattgtctgaaggtatagatgaagtaaaagcagactatagcttagcaattagaatgcttaaagaaataagagatgcttataaaaacattggtcataaactcaaagaaggtgaaacatatatatcaagggatctccaatttataagtaaggtgattcaatctgaaggagtcatgcatcctacccctataaaaaagatattaagagtaggtccttggataaatacaatactagatgatattaaaaccagtgcagaatcaataggaagtctatgtcaagaactagaattcagaggggagagtatactagttagcttgatattaaggaatttctggctgtataacttgtacatgtatgagtcaaaacagcacccattagctgggaagcaactgttcaagcaattgaacaaaacattaacatctgtgcagagattttttgaactgaagaaagaaaatgatgtggttgacctatggatgaatataccaatgcagtttggagggggagatccagtagttttttacagatctttttacagaaggactcccgatttcctaactgaagcaatcagccatgtggatttactgttaaaagtgtcaaacaatatcaaagatgagactaagatacgatttttcaaagccttattatctatagaaaagaatgaacgtgctacattaacaacactaatgagagaccctcaggcagtaggatcagaacgacaagctaaggtaacaagtgatataaatagaacagcagttaccagcatactgagtctatctccgaatcagctcttctgtgatagtgctatacattatagtagaaatgaggaagaagttgggatcattgcagacaacataacacctgtctatcctcatgggctgagagtgctctatgaatcactaccttttcataaggctgaaaaggttgtcaatatgatatcaggcacaaagtctataactaatctattacagagaacatctgctatcaatggtgaagatattgatagagcagtgtctatgatgttagagaacttagggttgttatctagaatattgtcagtaataattaatagtatagaaataccaatcaagtccaatggcagattgatatgctgtcaaatttccaagaccttgagagaaaaatcatggaacaatatggaaatagtaggagtgacatctcctagtattgtgacatgtatggatgttgtgtatgcaactagttctcatttaaaaggaataattattgaaaaattcagtactgacaagaccacaagaggtcagaggggaccaaaaagcccctgggtaggatcaagcactcaagagaaaaaattggttcctgtttataatagacaaattctttcaaaacaacaaaaagagcaactggaagcaatagggaaaatgaggtgggtgtacaaaggaactccagggctaagaagattgctcaacaagatttgcataggaagcttaggtattagctataaatgtgtgaaacctttattaccaagattcatgagtgtaaacttcttacataggttatctgttagtagtagacccatggaattcccagcttctgttccagcttacaggacaacaaattaccattttgacactagtccaatcaaccaagcattaagtgagaggttcgggaacgaagacattaatttagtgttccaaaatgcaatcagctgcggaattagtataatgagtgttgtagaacagttaactggtagaagcccaaaacaattagtcctaatccctcaattagaagagatagatattatgcctcctcctgtatttcaaggaaaattcaattataaactagttgataagataacctccgatcaacacatcttcagtcctgacaaaatagacatattaacactagggaagatgcttatgcctaccataaaaggtcaaaaaactgatcagttcttaaataagagagaaaactattttcatggaaataatttaattgaatctttatctgcagcacttgcatgccactggtgtgggatattaacagaacagtgcatagaaaacaatatctttaggaaagattggggtgatgggttcatctcagatcatgccttcatggatttcaaggtatttctatgtgtatttaaaaccaaacttttatgtagttggggatctcaaggaaagaatgtaaaagatgaagatataatagatgaatccattgacaaattattaagaattgacaacaccttttggagaatgttcagcaaagtcatgtttgaatcaaaagtcaaaaaaagaataatgttatatgatgtgaaattcctatcattagtaggttatataggatttaaaaactggtttatagaacagttaagagtggtagaattgcatgaggtaccttggattgtcaatgctgaaggagagttagttgaaattaaatcaatcaaaatttatctgcagttaatagaacaaagtctatctttgagaataactgtattgaattatacagacatggcacatgctcttacacgattaattaggaaaaaattgatgtgtgataatgcactctttaatccaagttcatcaccaatgtttaatctaactcaggttattgatcccacaacacaactagactattttcctaggataatatttgagaggttaaaaagttatgataccagttcagactacaacaaagggaagttaacaaggaattacatgacattattaccatggcaacacgtaaacaggtacaattttgtctttagttctacaggttgtaaagtcagtttgaagacatgcatcgggaaattgataaaggatttaaatcctaaagttctttactttattggagaaggagcaggtaactggatggcaagaacagcatgtgaatatcctgatataaaatttgtatataggagtttaaaggatgaccttgatcaccattacccattagaatatcaaagggtaataggtgatctaaatagggtgatagatagtggtgaaggattatcaatggaaaccacagatgcaactcaaaaaactcattgggacttgatacacagaataagtaaagatgctttattgataacattgtgtgatgcagaattcaaaaacagagatgatttctttaagatggtaatcctttggagaaaacatgtattatcttgtagaatctgtacagcttatggaacagatctttacttatttgcaaagtatcatgcggtggactgcaatataaaattaccattttttgtaagatctgtagctacttttattatgcaaggaagcaaattatcagggtcagaatgttacatacttttaacattaggtcatcacaataatctaccctgtcatggagaaatacaaaattccaaaatgagaatagcagtgtgtaatgatttctatgcctcaaagaaactggacaacaaatcaattgaagcaaactgcaaatctcttctatcaggattgagaatacctataaacaaaaaggagttaaatagacaaaagaaattgttaacactacaaagtaaccattcttctatagcaacagttggcggcagtaagattatagaatccaaatggttaaagaataaagcaagtacaataattgattggttagagcatattttgaattctccaaaaggtgaattaaactatgatttctttgaagcattagagaacacataccccaatatgatcaagcttatagataatttgggaaatgcagaaataaagaaactaatcaaggtcactgggtatatgcttgtgagtaagaagtaataataatgataatgattaaccataatctcacacaactgagaaaataatcgtctaacagtttagttgatcattagttatttaaaattataaaatagtaactaactgataaaaaatcagaaattgaaattgaatgtatacggtttttttgccgt

SEQ ID NO: 95 - DNA, 13350 bp, human metapneumo virus
gtataaattagattccaaaaaaatatgggacaagtgaaaatgtctcttcaagggattcacctgagtgatttatcatacaagcatgctatattaaaagagtctcagtacacaataaaaagagatgtgggtacaacaactgcagtgacaccctcatcattgcaacaagaaataacactgttgtgtggagaaattctgtatgctaaacatgctgactacaaatatgctgcagaaataggaatacaatatattagcacagctttaggatcagagagagtgcagcagattctgaggaactcaggcagtgaagtccaagtggtcttaaccagaacgtactctctggggaaaattaaaaacaataaaggagaagatttacagatgttagacatacacggggtagagaagagctgggtagaagagatagacaaagaagcaaggaaaacaatggcaaccttgcttaaggaatcatcaggtaatatcccacaaaatcagaggccctcagcaccagacacacccataatcttattatgtgtaggtgccttaatattcactaaactagcatcaaccatagaagtgggactagagaccacagtcagaagggctaaccgtgtactaagtgatgcactcaagagataccctagaatggacataccaaagattgccagatccttctatgacttatttgaacaaaaagtgtatcacagaagtttgttcattgagtatggcaaagcattaggctcatcatctacaggcagcaaagcagaaagtctatttgttaatatattcatgcaagcttatggggccggtcaaacaatgctaaggtggggggtcattgccaggtcatccaacaatataatgttaggacatgtatccgtccaagctgagttaaaacaggtcacagaagtctatgacttggtgcgagaaatgggccctgaatctggacttctacatttaaggcaaagcccaaaagctggactgttatcactagccaactgtcccaactttgcaagtgttgttctcggaaatgcctcaggcttaggcataatcggtatgtatcgagggagagtaccaaacacagaattattttcagcagctgaaagttatgccaaaagtttgaaagaaagcaataaaataaatttctcttcattaggacttacagatgaagagaaagaggctgcagaacatttcttaaatgtgagtgacgacagtcaaaatgattatgagtaattaaaaaagtgggacaagtcaaaatgtcattccctgaaggaaaagatattcttttcatgggtaatgaagcagcaaaattagcagaagctttccagaaatcattaagaaaaccaggtcataaaagatctcaatctattataggagaaaaagtgaatactgtatcagaaacattggaattacctactatcagtagacctgcaaaaccaaccataccgtcagaaccaaagttagcatggacagataaaggtggggcaaccaaaactgaaataaagcaagcaatcaaagtcatggatcccattgaagaagaagagtctaccgagaagaaggtgctaccctccagtgatgggaaaacccctgcagaaaagaaactgaaaccatcaactaacaccaaaaagaaggtttcatttacaccaaatgaaccagggaaatatacaaagttggaaaaagatgctctagatttgctctcagataatgaagaagaagatgcagaatcttcaatcttaacctttgaagaaagagatacttcatcattaagcattgaggccagattggaatcaatagaggagaaattaagcatgatattagggctattaagaacactcaacattgctacagcaggacccacagcagcaagagatgggatcagagatgcaatgattggcgtaagagaggaattaatagcagacataataaaggaagctaaagggaaagcagcagaaatgatggaagaggaaatgagtcaacgatcaaaaataggaaatggtagtgtaaaattaacagaaaaagcaaaagagctcaacaaaattgttgaagatgaaagcacaagtggagaatccgaagaagaagaagaaccaaaagacacacaagacaatagtcaagaagatgacatttaccagttaattatgtagtttaataaaaataaacaatgggacaagtaaaaatggagtcctacctagtagacacctatcaaggcattccttacacagcagctgttcaagttgatctaatagaaaaggacctgttacctgcaagcctaacaatatggttccctttgtttcaggccaacacaccaccagcagtgctgctcgatcagctaaaaaccctgacaataaccactctgtatgctgcatcacaaaatggtccaatactcaaagtgaatgcatcagcccaaggtgcagcaatgtctgtacttcccaaaaaatttgaagtcaatgcgactgtagcactcgatgaatatagcaaactggaatttgacaaactcacagtctgtgaagtaaaaacagtttacttaacaaccatgaaaccatacgggatggtatcaaaatttgtgagctcagccaaatcagttggcaaaaaaacacatgatctaatcgcactatgtgattttatggatctagaaaagaacacacctgttacaataccagcattcatcaaatcagtttcaatcaaagagagtgagtcagctactgttgaagctgctataagcagtgaagcagaccaagctctaacacaggccaaaattgcaccttatgcgggattaattatgatcatgactatgaacaatcccaaaggcatattcaaaaagcttggagctgggactcaagtcatagtagaactaggagcatatgtccaggctgaaagcataagcaaaatatgcaagacttggagccatcaagggacaagatatgtcttgaagtccagataacaaccaagcaccttggccaagagctactaaccctatctcatagatcataaagtcaccattctagttatataaaaatcaagttagaacaagaattaaatcaatcaagaacgggacaaataaaaatgtcttggaaagtggtgatcattttttcattgttaataacacctcaacacggtcttaaagagagctacttagaagagtcatgtagcactataactgaaggatatctcagtgttctgaggacaggttggtacaccaatgtttttacactggaggtaggcgatgtagagaaccttacatgtgccgatggacccagcttaataaaaacagaattagacctgaccaaaagtgcactaagagagctcagaacagtttctgctgatcaactggcaagagaggagcaaattgaaaatcccagacaatctagattcgttctaggagcaatagcactcggtgttgcaactgcagctgcagttacagcaggtgttgcaattgccaaaaccatccggcttgaaagtgaagtaacagcaattaagaatgccctcaaaaagaccaatgaagcagtatctacattggggaatggagttcgtgtgttggcaactgcagtgagagagctgaaagattttgtgagcaagaatctaacacgtgcaatcaacaaaaacaagtgcgacattgctgacctgaaaatggccgttagcttcagtcaattcaacagaaggttcctaaatgttgtgcggcaattttcagacaacgctggaataacaccagcaatatctttggacttaatgacagatgctgaactagccagagctgtttccaacatgccaacatctgcaggacaaataaaactgatgttggagaaccgtgcaatggtaagaagaaaagggttcggattcctgataggagtttacggaagctccgtaatttacatggtgcaactgccaatctttggggttatagacacgccttgctggatagtaaaagcagccccttcttgttcaggaaaaaagggaaactatgcttgcctcttaagagaagaccaaggatggtattgtcaaaatgcagggtcaactgtttactacccaaatgaaaaagactgtgaaacaagaggagaccatgtcttttgcgacacagcagcaggaatcaatgttgctgagcagtcaaaggagtgcaacataaacatatctactactaattacccatgcaaagttagcacaggaagacatcctatcagtatggttgcactatctcctcttggggctttggttgcttgctacaagggagtgagctgttccattggcagcaacagagtagggatcatcaagcaactgaacaaaggctgctcttatataaccaaccaagacgcagacacagtgacaatagacaacactgtataccagctaagcaaagttgaaggcgaacagcatgttataaaaggaaggccagtgtcaagcagctttgacccagtcaagtttcctgaagatcaattcaatgttgcacttgaccaagttttcgagagcattgagaacagtcaggccttggtggatcaatcaaacagaatcctaagcagtgcagagaaaggaaacactggcttcatcattgtaataattctaattgctgtccttggctctaccatgatcctagtgagtgtttttatcataataaagaaaacaaagaaacccacaggagcacctccagagctgagtggtgtcacaaacaatggcttcataccacataattagttaattaaaaataaagtaaattaaaataaattaaaattaaaaataaaaatttgggacaaatcataatgtctcgcaaggctccgtgcaaatatgaagtgcggggcaaatgcaatagaggaagtgagtgcaagtttaaccacaattactggagttggccagatagatacttattaataagatcaaattatttattaaatcaacttttaaggaacactgatagagctgatggcttatcaataatatcaggagcaggcagagaagataggacacaagattttgtcctaggttccaccaatgtggttcaaggttatattgatgataaccaaagcataacaaaagctgcagcctgttacagtctacataatataatcaaacaactacaagaagttgaagttaggcaggctagagataacaaactatctgacagcaaacatgtagcacttcacaacttagtcctatcttatatggagatgagcaaaactcctgcatctttaatcaacaatctcaagagactgccgagagagaaactgaaaaaattagcaaagctcataattgacttatcagcaggtgctgaaaatgactcttcatatgccttgcaagacagtgaaagcactaatcaagtgcagtgagcatggtccagttttcattactatagaggttgatgacatgatatggactcacaaggacttaaaagaagctttatctgatgggatagtgaagtctcatactaacatttacaattgttatttagaaaacatagaaattatatatgtcaaggcttacttaagttagtaaaaacacatcagagtgggataaatgacaatgataacattagatgtcattaaaagtgatgggtcttcaaaaacatgtactcacctcaaaaaaataattaaagaccactctggtaaagtgcttattgtacttaagttaatattagctttactaacatttctcacagtaacaatcaccatcaattatataaaagtggaaaacaatctgcaaatatgccagtcaaaaactgaatcagacaaaaaggactcatcatcaaataccacatcagtcacaaccaagactactctaaatcatgatatcacacagtattttaaaagtttgattcaaaggtatacaaactctgcaataaacagtgacacatgctggaaaataaacagaaatcaatgcacaaatataacaacatacaaatttttatgttttaaatctgaagacacaaaaaccaacaattgtgataaactgacagatttatgcagaaacaaaccaaaaccagcagttggagtgtatcacatagtagaatgccattgtatatacacagttaaatggaagtgctatcattacccaaccgatgaaacccaatcctaaatgttaacaccagattaggatccatccaagtctgttagttcaacaatttagttatttaaaaatattttgaaaacaagtaagtttctatgatacttcataataataagtaataattaattgcttaatcatcatcacaacattattcgaaaccataactattcaatttaaaaagtaaaaaacaataacatgggacaagtagttatggaggtgaaagtggagaacattcgaacaatagatatgctcaaagcaagagtaaaaaatcgtgtggcacgcagcaaatgctttaaaaatgcctctttggtcctcataggaataactacattgagtattgccctcaatatctatctgatcataaactataaaatgcaaaaaaacacatctgaatcagaacatcacaccagctcatcacccatggaatccagcagagaaactccaacggtccccacagacaactcagacaccaactcaagcccacagcatccaactcaacagtccacagaaggctccacactctactttgcagcctcagcaagctcaccagagacagaaccaacatcaacaccagatacaacaaaccgcccgcccttcgtcgacacacacacaacaccaccaagcgcaagcagaacaaagacaagtccggcagtccacacaaaaaacaacccaaggacaagctctagaacacattctccaccacgggcaacgacaaggacggcacgcagaaccaccactctccgcacaagcagcacaagaaagagaccgtccacagcatcagtccaacctgacatcagcgcaacaacccacaaaaacgaagaagcaagtccagcgagcccacaaacatctgcaagcacaacaagaatacaaaggaaaagcgtggaggccaacacatcaacaacatacaaccaaactagttaacaaaaaatacaaaataactctaagataaaccatgcagacaccaacaatggagaagccaaaagacaattcacaatctccccaaaaaggcaacaacaccatattagctctgcccaaatctccctggaaaaaacactcgcccatataccaaaaataccacaaccaccccaagaaaaaaactgggcaaaacaacacccaagagacaaataacaatggatcctctcaatgaatccactgttaatgtctatcttcctgactcatatcttaaaggagtgatttcctttagtgagactaatgcaattggttcatgtctcttaaaaagaccttacctaaaaaatgacaacactgcaaaagttgccatagagaatcctgttatcgagcatgttagactcaaaaatgcagtcaattctaagatgaaaatatcagattacaagatagtagagccagtaaacatgcaacatgaaattatgaagaatgtacacagttgtgagctcacattattaaaacagtttttaacaaggagtaaaaatattagcactctcaaattaaatatgatatgtgattggctgcagttaaagtctacatcagatgatacctcaatcctaagttttatagatgtagaatttatacctagctgggtaagcaattggtttagtaattggtacaatctcaacaagttgattctggaattcaggaaagaagaagtaataagaactggttcaatcttgtgtaggtcattgggtaaattagtttttgttgtatcatcatatggatgtatagtcaagagcaacaaaagcaaaagagtgagcttcttcacatacaatcaactgttaacatggaaagatgtgatgttaagtagattcaatgcaaatttttgtatatgggtaagcaacagtctgaatgaaaatcaagaagggctagggttgagaagtaatctgcaaggcatattaactaataagctatatgaaactgtagattatatgcttagtttatgttgcaatgaaggtttctcacttgtgaaagagttcgaaggctttattatgagtgaaattcttaggattactgaacatgctcaattcagtactagatttagaaatactttattaaatggattaactgatcaattaacaaaattaaaaaataaaaacagactcagagttcatggtaccgtgttagaaaataatgattatccaatgtacgaagttgtacttaagttattaggagatactttgagatgtattaaattattaatcaataaaaacttagagaatgctgctgaattatactatatatttagaatattcggtcacccaatggtagatgaaagagatgcaatggatgctgtcaaattaaacaatgaaatcacaaaaatccttaggtgggagagcttgacagaactaagaggggcattcatattaaggattatcaaaggatttgtagacaacaacaaaagatggcccaaaattaaaaacttaaaagtgcttagtaagagatggactatgtacttcaaagcaaaaagttaccccagtcaacttgaattaagcgaacaagattttttagagcttgctgcaatacagtttgaacaagagttttctgtccctgaaaaaaccaaccttgagatggtattaaatgataaagctatatcacctcctaaaagattaatatggtctgtgtatccaaaaaattacttacctgagaaaataaaaaatcgatatctagaagagactttcaatgcaagtgatagtctcaaaacaagaagagtactagagtactatttgaaagataataaattcgaccaaaaagaacttaaaagttatgttgttaaacaagaatatttaaatgataaggatcatattgtctcgctaactggaaaagaaagagaattaagtgtaggtagaatgtttgctatgcaaccaggaaaacagcgacaaatacaaatattggctgaaaaattgttagctgataatattgtaccttttttcccagaaaccttaacaaagtatggtgatctagatcttcagagaataatggaaatcaaatcggaactttcttctattaaaactagaagaaatgatagttataataattacattgcaagagcatccatagtaacagatttaagtaagttcaaccaagcctttaggtatgaaactacagcgatctgtgcggatgtagcagatgaactacatggaacacaaagcctattctgttggttacatcttatcgtccctatgacaacaatgatatgtgcctatagacatgcaccaccagaaacaaaaggtgaatatgatatagataagatagaagagcaaagtggtttatatagatatcatatgggtggtattgaaggatggtgtcaaaaactctggacaatggaagctatatctctattagatgttgtatctgtaaaaacacgatgtcaaatgacatctttattaaacggtgacaaccaatcaatagatgtaagtaaaccagttaagttatctgagggtttagatgaagtgaaagcagattatagcttggctgtaaaaatgttaaaagaaataagagatgcatacagaaatataggccataaacttaaagaaggggaaacatatatatcaagagatcttcagtttataagtaaggtgattcaatctgaaggagtaatgcatcctacccctataaaaaagatcttaagagtgggaccatggataaacacaatattagatgacattaaaaccagtgcagagtcaatagggagtctatgtcaggaattagaatttaggggggaaagcataatagttagtctgatattaaggaatttttggctgtataatttatacatgcatgaatcaaagcaacaccccctagcagggaagcagttattcaaacaactaaataaaacattaacatcagtgcagagattttttgaaataaaaaaggaaaatgaagtagtagatctatggatgaacataccaatgcagtttggaggaggagatccagtagtcttctatagatctttctatagaaggacccctgattttttaactgaagcaatcagtcatgtggatattctgttaagaatatcagccaacataagaaatgaagcgaaaataagtttcttcaaagccttactgtcaatagaaaaaaatgaacgtgctacactgacaacactaatgagagatcctcaagctgttggctcagagcgacaagcaaaagtaacaagtgatatcaatagaacagcagttaccagcatcttaagtctttctccaaatcaacttttcagcgatagtgctatacactacagtagaaatgaagaagaggtcggaatcattgctgacaacataacacctgtttatcctcatggactgagagttttgtatgaatcattaccttttcataaagctgaaaaagttgtgaatatgatatcaggaacgaaatccataaccaacttattacagagaacatctgctattaatggtgaagatattgacagagctgtatccatgatgctggagaacctaggattattatctagaatattgtcagtagttgttgatagtatagaaattccaaccaaatctaatggtaggctgatatgttgtcagatatctagaaccctaagggagacatcatggaataatatggaaatagttggagtaacatcccctagcatcactacatgcatggatgtcatatatgcaactagctctcatttgaaagggataatcattgaaaagttcagcactgacagaactacaagaggtcaaagaggtccaaagagcccttgggtagggtcgagcactcaagagaaaaaattagttcctgtttataacagacaaattctttcaaaacaacaaagagaacagctagaagcaattggaaaaatgagatgggtatataaagggacaccaggtttaagacgattactcaataagatttgtcttggaagtttaggcattagttacaaatgtgtaaaacctttattacctaggtttatgagtgtaaatttcctacacaggttatctgtcagtagtagacctatggaattcccagcatcagttccagcttatagaacaacaaattaccattttgacactagtcctattaatcaagcactaagtgagagatttgggaatgaagatattaatttggtcttccaaaatgcaatcagctgtggaattagcataatgagtgtagtagaacaattaactggtaggagtccaaaacagttagttttaatacctcaattagaagaaatagacattatgccaccaccagtgtttcaagggaaattcaattataagctagtagataagataacttctgatcaacatatcttcagtccagacaaaatagatatgttaacactggggaaaatgctcatgcccactataaaaggtcagaaaacagatcagttcctgaacaagagagagaattatttccatgggaataatcttattgagtctttgtcagcagcgttagcatgtcattggtgtgggatattaacagagcaatgtatagaaaataatattttcaagaaagactggggtgacgggttcatatcggatcatgcttttatggacttcaaaatattcctatgtgtctttaaaactaaacttttatgtagttgggggtcccaagggaaaaacattaaagatgaagatatagtagatgaatcaatagataaactgttaaggattgataatactttttggagaatgttcagcaaggttatgtttgaatcaaaggttaagaaaaggataatgttatatgatgtaaaatttctatcattagtaggttatatagggtttaagaattggtttatagaacagttgagatcagctgagttgcatgaggtaccttggattgtcaatgccgaaggtgatctggttgagatcaagtcaattaaaatctatttgcaactgatagagcaaagtttatttttaagaataactgttttgaactatacagatatggcacatgctctcacaagattaatcagaaagaagttgatgtgtgataatgcactattaactccgattccatccccaatggttaatttaactcaagttattgatcctacagaacaattagcttatttccctaagataacatttgaaaggctaaaaaattatgacactagttcaaattatgctaaaggaaagctaacaaggaattacatgatactgttgccatggcaacatgttaatagatataactttgtctttagttctactggatgtaaagttagtctaaaaacatgcattggaaaacttatgaaagatctaaaccctaaagttctgtactttattggagaaggggcaggaaattggatggccagaacagcatgtgaatatcctgacatcaaatttgtatacagaagtttaaaagatgaccttgatcatcattatcctttggaataccagagagttataggagaattaagcaggataatagatagcggtgaagggctttcaatggaaacaacagatgcaactcaaaaaactcattgggatttgatacacagagtaagcaaagatgctttattaataactttatgtgatgcagaatttaaggacagagatgatttttttaagatggtaattctatggaggaaacatgtattatcatgcagaatttgcactacttatgggacagacctctatttattcgcaaagtatcatgctaaagactgcaatgtaaaattacctttttttgtgagatcagtagccacctttattatgcaaggtagtaaactgtcaggctcagaatgctacatactcttaacactaggccaccacaacaatttaccctgccatggagaaatacaaaattctaagatgaaaatagcagtgtgtaatgatttttatgctgcaaaaaaacttgacaataaatctattgaagccaactgtaaatcacttttatcagggctaagaataccgataaataagaaagaattaaatagacagagaaggttattaacactacaaagcaaccattcttctgtagcaacagttggaggtagcaaggtcatagagtctaaatggttaacaaacaaggcaaacacaataattgattggttagaacatattttaaattctccaaaaggtgaattaaattatgatttttttgaagcattagaaaatacttaccctaatatgattaaactaatagataatctagggaatgcagagataaaaaaactgatcaaagtaactggatatatgcttgtaagtaaaaaatgaaaaatgataaaaatgataaaataggtgacaacttcatactattccaaagtaatcatttgattatgcaattatgtaatagttaattaaaaactaaaaatcaaaagttagaaactaacaactgtcattaagtttattaaaaataagaaattataattggatgtatacg

SEQ ID NO: 96 - DNA, 13215 bp, human metapneumo virus
acgcgaaaaaaacgcgtataaattaagttacaaaaaaccatgggacaagtgaaaatgtctcttcaagggattcacctgagtgatctatcatacaagcatgctatattaaaagagtctcagtatacaataaagagagatgtaggcacaacaaccgcagtgacaccctcatcattgcaacaagaaataacactattgtgtggagaaattctatatgctaagcatgctgattacaaatatgctgcagaaataggaatacaatatattagcacagctctaggatcagagagagtacagcagattctaagaaactcaggtagtgaagtccaagtggttttaaccagaacgtactccttggggaaagttaaaaacaacaaaggagaagatttacagatgttagacatacacggagtagagaaaagctgggtggaagagatagacaaagaagcaagaaaaacaatggcaactttgcttaaagaatcatcaggcaatattccacaaaatcagaggccttcagcaccagacacacccataatcttattatgtgtaggtgccttaatatttaccaaactagcatcaactatagaagtgggattagagaccacagtcagaagagctaaccgtgtactaagtgatgcactcaaaagataccctaggatggacataccaaaaatcgctagatctttctatgacttatttgaacaaaaagtgtattacagaagtttgttcattgagtatggcaaagcattaggctcatcctctacaggcagcaaagcagaaagtttattcgttaatatattcatgcaagcttacggtgctggtcaaacaatgctgaggtggggagtcattgccaggtcatctaacaatataatgttaggacatgtatctgttcaagctgagttaaaacaagtcacagaagtctatgacctggtgcgagaaatgggccctgaatctgggctcctacatttaaggcaaagcccaaaagctggactgttatcactagccaattgtcccaactttgctagtgttgttctcggcaatgcctcaggcttaggcataataggtatgtatcgcgggagagtgccaaacacagaactattttcagcagcagaaagctatgccaagagtttgaaagaaagcaataaaattaacttttcttcattaggactcacagatgaagaaaaagaggctgcagaacacttcctaaatgtgagtgacgacagtcaaaatgattatgagtaattaaaaaaatgggacaagtcaaaatgtcattccctgaaggaaaagatattcttttcatgggtaatgaagcagcaaaattggcagaagcttttcaaaaatcattaagaaaacctaatcataaaagatctcaatctattataggagaaaaagtgaacactgtatctgaaacattggaattacctactatcagtagacctaccaaaccgaccatattgtcagagccgaagttagcatggacagacaaaggtggggcaatcaaaactgaagcaaagcaaacaatcaaagttatggatcctattgaagaagaagagtttactgagaaaagggtgctgccctccagtgatgggaaaactcctgcagaaaagaagttgaaaccatcaaccaacactaaaaagaaggtctcatttacaccaaatgaaccaggaaaatacacaaagttggagaaagatgctctagacttgctttcagacaatgaagaagaagatgcagaatcctcaatcttaaccttcgaagaaagagatacttcatcattaagcattgaagccagactagaatcgattgaggagaaattaagcatgatattagggctattaagaacactcaacattgctacagcaggacccacagcagcaagagatgggatcagagatgcaatgattggcataagggaggaactaatagcagacataataaaagaagccaagggaaaagcagcagaaatgatggaagaagaaatgaaccagcggacaaaaataggaaacggtagtgtaaaattaactgaaaaggcaaaggagctcaacaaaattgttgaagacgaaagcacaagtggtgaatccgaagaagaagaagaaccaaaagacacacaggaaaataatcaagaagatgacatttaccagttaattatgtagtttaataaaaataaaaatgggacaagtgaaaatggagtcctatctggtagacacttatcaaggcatcccttacacagcagctgttcaagttgatctagtagaaaaggacctgttacctgcaagcctaacaatatggttccccttgtttcaggccaatacaccaccagcagttctgcttgatcagctaaagactctgactataactactctgtatgctgcatcacaaagtggtccaatactaaaagtgaatgcatcagcccagggtgcagcaatgtctgtacttcccaaaaagtttgaagtcaatgcgactgtagcacttgacgaatatagcaaattagaatttgacaaacttacagtctgtgaagtaaaaacagtttacttaacaaccatgaaaccatatgggatggtatcaaagtttgtgagctcggccaaatcagttggcaaaaaaacacatgatctaatcgcattatgtgattttatggatctagaaaagaacacaccagttacaataccagcatttatcaaatcagtttctatcaaggagagtgaatcagccactgttgaagctgcaataagcagtgaagcagaccaagctctaacacaagccaaaattgcaccttatgcgggactgatcatgattatgaccatgaacaatcccaaaggcatattcaagaagcttggagctgggacccaagttatagtagaactaggagcatatgtccaggctgaaagcataagtaaaatatgcaagacttggagccatcaaggaacaagatatgtgctgaagtccagttaacagccaagcaacctggccaagaactaccaactctattctatagactaaaaagtcgccattttagttatataaaaatcaagttagaataagaattaaatcaatcaagaacgggacaaataaaaatgtcttggaaagtggtgatcattttttcattgctaataacacctcaacacggtcttaaagagagctacctagaagaatcatgtagcactataactgagggatatcttagtgttctgaggacaggttggtataccaacgtttttacattagaggtgggtgatgtagaaaaccttacatgttctgatggacctagcctaataaaaacagaattagatctgaccaaaagtgcactaagagagctcaaaacagtctctgctgaccaattggcaagagaggaacaaattgagaatcccagacaatctaggtttgttctaggagcaatagcactcggtgttgcaacagcagctgcagtcacagcaggtgttgcaattgccaaaaccatccggcttgagagtgaagtcacagcaattaagaatgccctcaaaacgaccaatgaagcagtatctacattggggaatggagttcgagtgttggcaactgcagtgagagagctaaaagactttgtgagcaagaatttaactcgtgcaatcaacaaaaacaagtgcgacattgatgacctaaaaatggctgttagcttcagtcaattcaacagaaggtttctaaatgttgtgcggcaattttcagacaatgctggaataacaccagcaatatctttggacttaatgacagatgctgaactagccagggccgtttctaacatgccgacatctgcaggacaaataaaattgatgttggagaaccgtgcgatggtgcgaagaaaggggttcggaatcctgataggggtctacgggagctccgtaatttacacggtgcagctgccaatctttggcgttatagacacgccttgctggatagtaaaagcagccccttcttgttccgaaaaaaagggaaactatgcttgcctcttaagagaagaccaagggtggtattgtcagaatgcagggtcaactgtttactacccaaatgagaaagactgtgaaacaagaggagaccatgtcttttgcgacacagcagcaggaattaatgttgctgagcaatcaaaggagtgcaacatcaacatatccactacaaattacccatgcaaagtcagcacaggaagacatcctatcagtatggttgcactgtctcctcttggggctctggttgcttgctacaaaggagtaagctgttccattggcagcaacagagtagggatcatcaagcagctgaacaaaggttgctcctatataaccaaccaagatgcagacacagtgacaatagacaacactgtatatcagctaagcaaagttgagggtgaacagcatgttataaaaggcagaccagtgtcaagcagctttgatccaatcaagtttcctgaagatcaattcaatgttgcacttgaccaagtttttgagaacattgaaaacagccaggccttagtagatcaatcaaacagaatcctaagcagtgcagagaaagggaatactggctttatcattgtaataattctaattgctgtccttggctctagcatgatcctagtgagcatcttcattataatcaagaaaacaaagaaaccaacgggagcacctccagagctgagtggtgtcacaaacaatggcttcataccacacagttagttaattaaaaataaaataaaatttgggacaaatcataatgtctcgcaaggctccatgcaaatatgaagtgcggggcaaatgcaacagaggaagtgagtgtaagtttaaccacaattactggagttggccagatagatacttattaataagatcaaactatctattaaatcagcttttaaggaacactgatagagctgatggcctatcaataatatcaggcgcaggcagagaagacagaacgcaagattttgttctaggttccaccaatgtggttcaaggttatattgatgataaccaaagcataacaaaagctgcagcctgctacagtctacacaacataatcaagcaactacaagaagttgaagttaggcaggctagagatagcaaactatctgacagcaagcatgtggcactccataacttaatcttatcttacatggagatgagcaaaactcccgcatctttaatcaacaatcttaaaagactgccgagagaaaaactgaaaaaattagcaaagctgataattgacttatcagcaggcgctgacaatgactcttcatatgccctgcaagacagtgaaagcactaatcaagtgcagtgagcatggtcctgttttcattactatagaggttgatgaaatgatatggactcaaaaagaattaaaagaagctttgtccgatgggatagtgaagtctcacaccaacatttacaattgttatttagaaaacatagaaattatatatgtcaaggcttacttaagttagtaaaaacacacatcagagtgggataagtgacaatgataacattagatgtcattaaaagtgatgggtcttcaaaaacatgtactcacctcaaaaaaataatcaaagaccattctggtaaagtgcttattgcacttaagttaatattagctttactaacatttttcacaataacaatcactataaattacataaaagtagaaaacaatctacaaatatgccagtcaaaaactgaatcagacaaagaagactcaccatcaaataccacatccgtcacaaccaagactactctagaccatgatataacacagtattttaaaagattaattcaaaggtatacagattctgtgataaacaaggacacatgctggaaaataagcagaaatcaatgcacaaatataacaacatataaatttttatgctttaaacctgaggactcaaaaatcaacagttgtgatagactgacagatctatgcagaaacaaatcaaaatcagcagctgaagcatatcatacagtagaatgccattgcatatacacaattgagtggaagtgctatcaccacccaatagattaaacccaattttgaatgttaaaactagactaggatccgtctaagactatcagttcaatagtttagttatttaaaaatatttgagaacaggtaagtttctatggcacttcatagcaataggtaataattaacagcttaattataattaaaacattatttaaaaccgtaactatttaatttacaaagtaaaaacaaaaatatgggacaagtagttatggaggtgaaagtagagaacattcgagcaatagacatgctcaaagcaagagtgaaaaatcgtgtggcacgtagcaaatgctttaaaaatgcttctttaatcctcataggaataactacactgagtatagctctcaatatctatctgatcataaactacacaatacaaaaaaccacatccgaatcagaacaccacaccagctcaccacccacagaacccaacaaggaagcttcaacaatctccacagacaacccagacatcaatccaagctcacagcatccaactcaacagtccacagaaaaccccacactcaaccccgcagcatcagcgagcccatcagaaacagaaccagcatcaacaccagacacaacaaaccgcctgtcctccgtagacaggtccacagcacaaccaagtgaaagcagaacaaagacaaaaccgacagtccacacaatcaacaacccaaacacagcttccagtacacaatccccaccacggacaacaacgaaggcaatccgcagagccaccactttccgcatgagcagcacaggaaaaagaccaaccacaacattagtccagtccgacagcagcaccacaacccaaaatcatgaagaaacaggttcagcgaacccacaggcgtctgcaagcacaatgcaaaactagcacaccaataatataaaaccaaattagttaacaaaaaatgcgagatagctctaaagcaaaacatgtaggtaccaacaatcaagaaaccaaaagacaactcacaatctccctaaaacagcaacgacaccatgtcagctttgctcaaatctctctgggagaaacttctacccacatactaacaacatcacaaccatctcaagaaaagaaactgggcaaaacagcatccaagagacaaatagcaatggatcctcttaatgaatccactgttaatgtctatctccctgattcgtaccttaaaggagtaatttcttttagtgaaactaatgcaattggttcatgtctcttaaaaagaccttacttaaaaaatgacaacactgcaaaagttgccatagagaatcctgttattgagcatgtgagactcaaaaatgcagtcaattctaaaatgaaaatatcagattacaaggtagtagagccagtaaacatgcaacatgaaataatgaagaatgtacacagttgtgagctcacactattgaaacagtttttaacaaggagtaaaaacattagcactctcaaattaaatatgatatgtgattggctgcaattaaagtctacatcagatgatacctcaatcctaagtttcatagatgtagaatttatacctagttgggtaagcaactggtttagtaattggtacaatctcaataagttaattttggaattcagaagagaggaagtaataagaaccggttcaatcttatgcaggtcattgggtaaattagtttttattgtatcatcatacggatgtatcgtcaagagcaacaaaagcaaaagagtgagcttcttcacatacaatcaactgttaacatggaaagatgtgatgttaagtagatttaatgcgaatttttgtatatgggtaagcaatagtctgaatgaaaatcaggaagggctagggttaagaagtaatctacaaggtatgttaactaataaactatatgaaactgtagattatatgctaagtttatgttgcaatgaaggtttctcacttgtaaaagagttcgaaggttttattatgagtgaaatccttaggattactgaacatgctcaattcagtactagatttagaaatactttattaaatggattaacagatcaattaacaaaattaaaaaataaaaacagactcagagttcatggtaccgtattagaaaataatgattatccaatgtatgaagttgtacttaaattattaggagatactttgagatgtatcaaattattaatcaataaaaacttagagaatgctgcagaattatactatatattcagaatttttggtcatccaatggtagatgaaagagatgcaatggatgctgtcaaattaaacaatgaaatcacaaaaatcctaaggttggagagcttgacagaactaagaggagcattcatattaaggattatcaaaggatttgtggacaacaacaaaaggtggcccaaaattaaaaatttaatagtgcttagcaaaagatggactatgtacttcaaagctaaaaattatcccagtcaactcgaattaagtgaacaagactttctagagcttgctgcaatacaatttgaacaagagttttctgttcctgaaaaaaccaatcttgagatggtattaaatgacaaagccatatcacctcctaaaagattaatatggtctgtgtatccaaagaattacttacctgagacgataaaaaatcgatatttagaagaaactttcaatgcgagtgatagtctcaaaacaagaagagtactagagtactatttaaaagacaataaatttgatcaaaaggaacttaaaagttatgtagttagacaagaatatttaaatgataaggagcacattgtctcattaactggaaaagaaagagaattaagtgtaggtagaatgtttgctatgcaaccaggaaaacagcgacaaatacaaatattggcagaaaaattgttagctgataacattgtacctttcttcccggaaaccttaacaaagtatggtgatctagatcttcagagaataatggaaatcaaatcagaactttcttctatcaaaaccagaagaaatgacagttataataattacattgcaagagcatccatagtaacagatttgagcaagttcaaccaagcctttagatatgaaactacagcgatctgtgcggatgtagcagacgaattacatggaacacaaagcttattctgttggttacatcttatcgttcctatgactacaatgatatgtgcctatagacatgcaccaccagaaacaaaaggtgaatatgatatagataagatagaagagcaaagtggtctatatagatatcacatgggcggtattgaaggatggtgtcaaaaactctggacaatggaagctatatctttattggatgttgtatctgtaaagacacggtgtcaaatgacatctttattaaacggtgataaccaatcaatagatgtaagtaaaccagtcaagttatctgaaggtttagatgaagtgaaggcagattatcgcttagcaataaaaatgctaaaagaaataagagatgcatacagaaatataggccataaacttaaagaaggggaaacatatatatcaagggatcttcaatttataagcaaggtgattcaatctgaaggagtgatgcatcctacccctataaaaaaggtcttgagagtaggaccatggataaacacaatattagatgacattaaaactagtgctgagtcaatagggagtctatgtcaagaattagaatttaggggagaaagcataatagttagtctgatattaagaaacttctggctgtataacttatacatgcatgaatcaaagcaacatcctttggcagggaaacagttattcaaacaactaaataaaacattaacatcagtgcagagattttttgaaattaaaaaggaaaatgaggtagtagatctatggatgaacataccaatgcaatttggaggaggagatccagtagtcttctatagatctttctatagaaggacccctgattttttaactgaggcaatcagccatgtagatattctgttaaaaatatcagctaacataaaaaatgaaacgaaagtaagtttcttcaaagccttactatcaatagaaaaaaatgaacgtgctacactgacaacgctaatgagagatcctcaagctgttggatcagaacgacaagcaaaagtaacaagtgacatcaatagaacagcagttaccagtatcttaagtctttccccaaatcaacttttcagtgatagtgctatacactatagcaggaatgaagaagaagtgggaatcattgcagaaaacataacacctgtttatcctcatgggctgagagtattatatgaatcattgccctttcacaaagctgaaaaagttgtaaacatgatatcagggacaaaatctataaccaacttattacagagaacatccgctattaatggtgaagatattgacagggctgtatctatgatgttggagaatctaggattattatctagaatattgtcagtagttgttgatagtatagaaattccaatcaaatctaatggtaggctgatatgttgtcaaatctctaggactttaagagagacatcatggaataatatggaaatagttggagtaacatctcctagcatcactacatgtatggatgtcatatatgcaactagttctcatttgaaggggataattatagaaaagttcagcactgacagaactacaaggggtcaaagaggtccaaaaagcccttgggtagggtcgagtactcaagagaaaaaattagtacctgtttataacagacaaattctttcaaaacaacaaagagaacagctagaagcaattggaaaaatgagatgggtgtataaagggacaccaggcttgcgacgattactcaacaagatctgtcttgggagtttaggcattagttacaaatgtgtaaaacctttattacctaggtttatgagtgtaaatttcttacataggttatctgtcagtagtagacctatggaattcccagcatcagttccagcttatagaacaacaaattaccatttcgacactagtcctattaatcaagcactaagtgagagatttgggaatgaagatattaacttggtcttccaaaatgcgatcagctgtggaattagcataatgagtgtagtagaacaattaacaggtagaagcccaaaacagttagttttaataccccaattagaagaaatagacattatgccaccaccagtgtttcaagggaaattcaattataaattagtagataagataacttctgatcaacatatcttcagtccggacaaaatagatatgttaacactagggaaaatgctcatgcctactataaaaggtcagaaaacagatcagttcttaaataagagagagaattatttccatgggaacaatcttattgagtctttatcagcagcattagcatgtcattggtgtgggatattaacagaacaatgcatagaaaataatattttcaagaaggactggggtgacgggtttatatcagatcatgcttttatggacttcaaaatattcctatgtgtctttaaaactaaacttttatgtagttggggatcccaagggaaaaacattaaagatgaagatatagtagatgaatcaatagataaattgttaaggattgacaatactttttggagaatgttcagcaaagttatgtttgaaccaaaagttaagaaaaggataatgttatatgatgtaaaattcctatcactagtaggctacatagggtttaagaactggtttatagagcagttgagatcagctgaattgcatgaaataccttggattgtcaatgccgaaggtgatttggttgagatcaagtcaattaaaatctatttgcaactgatagaacaaagcttatttttaagaataactgttttgaactatacagatatggcacatgctctcacacgattaatcagaaagaagttaatgtgtgataatgcactgttaaccccaatttcatccccaatggttaacttaactcaagttattgatcccacaacacaattagattacttccccaagataacattcgaaaggctaaaaaattatgacacaagttcaaattatgctaaaggaaagctaacaagaaattacatgatactattgccatggcagcatgttaatagatataactttgtctttagttctactggatgtaaagttagtctgaaaacatgtattggaaaacttatgaaagacttaaatcctaaagttttgtactttattggagaaggagcaggaaattggatggccagaacagcatgtgaatatcctgatattaaatttgtatatagaagtctgaaagatgaccttgatcatcattatcctctggaataccagagagtgataggtgaattaagcagaatcatagatagtggtgaaggactttcaatggaaacaacagacgcaactcaaaaaactcattgggatttgatacacagggtaagcaaagatgctttattaataactttatgtgatgcagaatttaaggacagagatgatttttttaagatggtaattctatggagaaaacatgtattatcatgcagaatttgcactacttatgggacggacctctatttattcgcaaagtatcatgctaaagactgcaatgtaaaattacctttttttgtgagatcagttgctactttcattatgcagggtagtaagctgtcaggttcagaatgctacatactcttaacactaggccaccacaacagtttaccttgccatggagaaatacaaaattctaagatgaaaatagcagtgtgtaatgatttttatgctgcaaaaaaactcgacaataaatcaattgaagctaattgtaaatcacttttgtcagggctaagaatacctataaataagaaggaactagatagacagagaagattattaacactacaaagcaatcattcttctgtggcaacagttggcggtagcaagatcatagagtctaaatggttaacaaacaaagcaagtacaataattgattggttagaacatattttaaattctccaaagggcgaattaaattatgatttttttgaagcattggagaacacttaccctaatatgattaaactaatagataacttagggaatgcagagattaaaaaacttatcaaagtaacaggatacatgcttgtaagtaaaaaatgaaaaatgatgaagatgacaaaatagatgacaacttcatactattctaaattaattatttgattat

SEQ ID NO: 97 - DNA, 13135 bp, human metapneumo virus
acgcgaaaaaaacgcgtataaattaaattccaaacaaaacgggacaaataaaaatgtctcttcaagggattcacctaagtgatctgtcatataaacatgctatattaaaagagtctcaatacacaataaaaagagatgtaggcaccacaactgcagtgacaccttcatcattgcagcaagagataacacttttgtgtggagagattctttacactaaacatactgattacaaatatgctgcagagatagggatacaatatatttgcacagctctaggatcagaaagagtacaacagattttaagaaattcaggtagtgaggttcaggtggttctaaccaagacatactctttagggaaaggtaaaaatagtaaaggggaagagttgcaaatgttagatatacatggagtggaaaagagttgggtagaagaaatagacaaagaggcaagaaaaacaatggtgactttgctaaaggaatcatcaggcaacatcccacaaaaccagaggccttcagcaccagacacaccaataattttattgtgtgtaggtgctttaatattcactaaactagcatcaacaatagaagttggactagagactacagttagaagggctaacagagtgttaagtgatgcgctcaaaagataccctagggtagatataccaaagattgctagatctttttatgaactatttgagcagaaagtgtattacaggagtctattcattgagtatgggaaagctttaggctcatcttcaacaggaagcaaagcagaaagtttgtttgtaaatatatttatgcaagcttatggagccggtcagacaatgctaaggtggggtgtcattgccagatcatctaacaacataatgctagggcatgtatctgtgcaagctgaattgaaacaagttacagaggtttatgatttggtaagagaaatgggtcctgaatctgggcttttacatctaagacaaagtccaaaggcaggactgttatcgttggctaattgccccaattttgctagtgttgttcttggtaatgcttcaggtctaggtataatcggaatgtacaggggaagagtgccaaacacagagctattttctgcagcagaaagttatgccagaagcttaaaagaaagcaacaaaatcaacttctcctcattagggctcacagacgaagaaaaagaagctgcagaacacttcttaaacatgagtgatgacaatcaagatgattatgagtaattaaaaaactgggacaagtcaaaatgtcattccctgaaggaaaagatatcctgttcatgggtaatgaagcagcaaaaatagcagaagctttccagaaatcactaaaaagatcaggtcacaaaagaacccagtctattgtaggggaaaaagtaaacactatatcagaaactctagagctacctaccatcagcaaacctgcacgatcatctacactgctagagccaaaattggcatgggcagacagcagcggagccaccaaaaccacagaaaaacaaacaaccaaaacaacagatcctgttgaagaagaggaactcaatgaaaagaaggtatcaccttccagtgatgggaagactcctgcagagaaaaaatcaaaatctccaaccaatgtaaaaaagaaagtttccttcacatcaaatgaaccagggaaatatactaaactagaaaaagatgccctagatttgctctcagacaatgaggaagaagacgcagagtcctcaatcctaacctttgaagagagagacacatcatcactaagcattgaggctagactagaatcaatagaagagaagctaagcatgatattaggactgcttcgtacacttaacattgcaacagcaggaccaacggctgcaagggatggaatcagagatgcaatgattggtataagagaagaactaatagcagaaataataaaagaagcaaagggaaaagcagccgaaatgatggaagaggaaatgaatcaaaggtcaaaaataggtaatggcagtgtaaaactaaccgagaaggcaaaagaacttaataaaattgttgaagacgagagcacaagtggtgaatcagaagaagaagaagaaccaaaagaaactcaggataacaatcaaggagaagatatctaccagttaatcatgtagtttaataaaaataaacaatgggacaagtcaagatggagtcctatctagtggacacttatcaaggcattccctacacagctgctgttcaagttgatctggtagaaaaagacttactaccagcaagtttgacaatatggtttcctctattccaagccaacacaccaccagcggttttgctcgatcagctaaaaaccttgactataacaactctgtatgctgcatcacagaatggtccaatactcaaagtaaatgcatcagctcagggtgctgctatgtctgtacttcccaaaaaattcgaagtaaatgcaactgtggcacttgatgaatacagcaaacttgactttgacaagttaacggtttgcgatgttaaaacagtttatttgacaaccatgaagccatatgggatggtgtcaaaatttgtgagttcagccaaatcagttggcaaaaagacacatgatctaattgcactgtgtgacttcatggacctagagaaaaatatacctgtgacaataccagcattcataaagtcagtttcaatcaaagagagtgagtcagccactgttgaagctgcaataagcagtgaggccgaccaagcattaacacaagccaaaattgcaccctatgcaggactaatcatgatcatgaccatgaacaatccaaaaggtatattcaagaaactaggagctggaacacaagtgatagtagagctaggggcatatgttcaagccgagagcatcagcaggatctgcaagagctggagtcaccaaggaacaagatatgtactaaaatccagataaaaataactgtcctaatcaataattgcttatataatcctaaagatcaatgagcttattattatagttatataaaaataatttagaactagaaaggtattaatagaaagcgggacaagtaaaaatgtcttggaaagtgatgattatcatttcgttactcataacacctcagcacggactaaaagaaagttatttagaagaatcatgtagtactataactgaaggatatctcagtgttttaagaacaggttggtacaccaatgtctttacattagaagttggtgatgttgaaaatcttacatgtactgatggacctagcttaatcaaaacagaacttgacctaaccaaaagtgctctgagagaactcaaaacagtttctgctgatcagttagcgagagaagaacaaattgaaaatcccagacaatcaaggtttgtcctaggtgcaatagctcttggagttgccacagcagcagcagtcacagcaggcattgcaatagccaaaaccataagacttgagagtgaagtgaatgcaatcaaaggtgctctcaaaacaaccaacgaggcagtatccacactaggaaatggagtgcgagtcctagccactgcagtaagagagctgaaagaatttgtgagcaaaaacctgactagtgcgatcaacaagaacaaatgtgacattgctgatctgaagatggctgtcagcttcagtcaattcaacagaagattcctaaatgttgtgcggcagttttcagacaatgcagggataacaccagcaatatcattggacctaatgactgatgctgagctggccagagctgtatcatacatgccaacatctgcaggacagataaaactaatgttagagaaccgtgcaatggtgaggagaaaaggatttggaatcttgataggggtctacggaagctctgtgatttacatggtccagctgccgatctttggtgtcatagatacaccttgttggataatcaaggcagctccctcttgttcagaaaaagatggaaattatgcttgcctcctaagagaggatcaagggtggtattgcaaaaatgcaggatccactgtttactacccaaatgaaaaagactgcgaaacaagaggtgatcatgttttttgtgacacagcagcagggatcaatgttgctgagcaatcaagagaatgcaacatcaacatatctaccaccaactacccatgcaaagtcagcacaggaagacaccctatcagcatggttgcactatcacctctcggtgctttggtagcttgctacaagggggttagctgctcgattggcagtaatcgggttggaataatcaaacaactacctaaaggctgctcatacataactaaccaggacgcagacactgtaacaattgacaacactgtgtatcaactaagcaaagttgagggtgaacagcatgtaataaaagggagaccagtttcaagcagttttgatccaatcaggtttcctgaggatcagttcaatgttgcgcttgatcaagtctttgaaagcattgaaaacagtcaagcactagtggaccagtcaaacaaaattctgaacagtgcagaaaaaggaaacactggtttcattattgtaataattttgattgctgttcttgggttaaccatgatttcagtgagcatcatcatcataatcaaaaaaacaaggaagcccacaggggcacctccagagctgaatggtgttaccaacggcggttttataccgcatagttagttaattaaaaaatgggacaaatcatcatgtctcgcaaagctccatgcaaatatgaagtacggggcaagtgcaacaggggaagtgagtgcaaattcaaccacaattactggagctggcctgataggtatttattgttaagatcaaattatctcttgaatcagcttttaagaaacactgataaggctgatggtttgtcaataatatcaggagcaggtagagaagataggactcaagactttgttcttggttctactaatgtggttcaagggtacattgataacaatcaaggaataacaaaggctgcagcttgctatagtctacataacataataaaacagctacaagaaatagaagtaagacaggctagagataataagctttctgacagcaaacatgtggcacttcacaacttgatattatcctatatggagatgagcaaaactcctgcatccctgattaataacctaaagaaactaccaagagaaaaactgaagaaattagcgaaattaataattgatttatcagcaggaactgataatgactcttcatatgccttgcaagacagtgaaagcactaatcaagtgcagtaagcatggtcccaaattcattaccatagaggcagatgatatgatatggacacacaaagaattaaaggagacactgtctgatgggatagtaaaatcacacaccaatatttacagttgttatttagaaaatatagaaataatatatgttaaagcttacttaagttagtaaaaaataaatagaatgggataaatgacaatgaaaacattagatgtcataaaaagtgatggatcctcagaaacatgtaatcaactcaaaaaaataataaaaaaacactcaggtaaattgcttattgcattaaaactgatattggccttattgacgtttttcacagtaacaattactgttaactatataaaagtagaaaacaatttgcaggcatgtcaattaaaaaatgaatcagacaaaaaggacacaaagctaaataccacatcaacaacaatcagacccattcctgatctaaatgcagtacagtacttgaaaaggctgattcagaaacacaccaactttgtcataaaagacagagatacctgttggagaatacacacgaatcaatgcacaaatataaaaatatataagttcttatgtttcgggtttatgaattcaacaaatacagactgtgaagaactaacagttttatgtgataaaaagtcaaaaaccatgacagaaaaacataggaaagcagagtgtcactgtctacatacaaccgagtggtggtgttattatctttaagagaaaactcggctttcaacattaaaatcagaacaaatcctatccagatctattaatataatagtttagtcattcaaaaactctaaatattgtctagacttcacaacactttgcggtcatatgcaataatcaatggtcaaaccactgttgcaaactcacccataatataatcactgagtaatacaaaacaagaaaatgggacaagtggccatggaagtaagagtggagaacattcgggcaatagacatgttcaaagcaaaaatgaaaaaccgtataagaagtagcaagtgctatagaaatgctacactgatccttattggattaacagcattaagtatggcacttaatatttttttaatcattgattatgcaatgttaaaaaacatgaccaaagtggaacactgtgttaatatgccgccggtagaaccaagcaagaagaccccaatgacctctgcagtagacttaaacaccaaacccaatccacagcaggcaacacagttggccgcagaggattcaacatctctagcagcaacctcagaggaccatctacacacagggacaactccaacaccagatgcaacagtctctcagcaaaccacagacgagtacacaacattgctgagatcaaccaacagacagaccacccaaacaaccacagagaaaaagccaaccggagcaacaaccaaaaaagaaaccacaactcgaactacaagcacagctgcaacccaaacactcaacactaccaaccaaactagctatgtgagagaggcaaccacaacatccgccagatccagaaacagtgccacaactcaaagcagcgaccaaacaacccaggcagcagacccaagctcccaaccacaccatacacagaaaagcacaacaacaacatacaacacagacacatcctctccaagtagttaacaaaaaaactataaaataatcatgaaaaccgaaaaactagaaaagttaatttgaactcagaaaagaacacaaacactatatgaattgtttgagcgtatatactaatgaaatagcatctgtttgtgcatcaataataccatcattatttaagaaataagaagaagctaaaattcaagggacaaataacaatggatccattttgtgaatccactgtcaatgtttatcttcctgactcatatctcaaaggagtaatatctttcagtgaaaccaatgcaattggctcatgccttttgaaaagaccctatctaaaaaaagataacactgctaaagttgctgtagaaaaccctgttgttgaacatgtcaggcttagaaatgcagtcatgaccaaaatgaagatatcagattataaagtggttgaaccaattaatatgcagcatgaaataatgaaaaatatacacagttgtgagctcacattattaaaacaattcttaacaagaagtaaaaacattagctctctaaaattaagtatgatatgtgattggttacagttaaaatccacctcagataacacatcaattcttaattttatagatgtggagtttatacctgtttgggtgagcaattggtttagtaactggtataatctcaataaattaatcttagagtttagaagagaggaagtaataagaactggttcaattttatgtagatcactaggcaagttagttttcattgtatcatcttatgggtgtgtagtaaaaagcaacaaaagtaaaagagtaagttttttcacatataaccaactgttaacatggaaagatgtgatgttaagtaggttcaatgcaaacttttgtatatgggtaagtaacaacctgaacaaaaatcaagaaggactaggatttagaagtaatctgcaaggtatgttaaccaataaattatatgaaactgttgattatatgttaagtctatgtagtaatgaagggttctcactagtgaaagagttcgaaggctttattatgagtgaaattcttaaaattactgagcatgctcaattcagtactaggtttaggaatactttattaaatgggttgactgaacaattatcaatgttgaaagctaaaaacagatctagagttcttggcactatattagaaaacaatgattaccccatgtatgaagtagtacttaaattattaggggacactttgaaaagtataaaattattaattaacaagaatttagaaaatgctgcagaattatattatatattcagaatttttggacaccctatggtagatgagagggaagcaatggatgctgttaaattaaataatgagattacaaaaattcttaaactggagagcttaacagaactaagaggagcatttatactaagaattataaaagggtttgtagataataataaaagatggcctaaaattaagaatttaaaagtgctcagtaaaagatgggttatgtatttcaaagccaaaagttaccctagccaacttgagctaagtgtacaagattttttagaacttgctgcagtacaattcgaacaggaattttctgtccctgaaaaaaccaaccttgagatggtattaaatgataaagcaatatctcctccaaaaaagttaatatggtcggtatatccaaaaaattatctacctgaaattataaaaaatcaatatttagaagaggtcttcaatgcaagtgacagtcaaagaacgaggagagtcttagaattttacttaaaagattgcaaatttgatcaaaaagaccttaaacgttatgtacttaaacaagagtatctaaatgacaaagaccacattgtctcattaactgggaaggaaagagaattaagtgtaggcaggatgtttgcaatgcaaccaggcaaacaaagacaaatacagatactagctgagaaacttctagctgataatattgtaccctttttcccagaaactttaacaaagtatggtgacttggatctccaaagaattatggaaatgaaatcagaactttcttccattaaaactaggaagaatgatagttacaacaattatattgcaagagcctccatagtaacagacctaagtaaattcaatcaagcctttagatatgaaaccacagctatctgtgcagatgtagcagatgagttacatggtacgcaaagcttattttgttggttacatcttattgttcccatgaccacaatgatatgtgcatacagacatgcaccaccagaaacaaagggggagtatgacatagacaaaatagaagagcaaagtgggctatacagatatcatatgggagggattgaagggtggtgtcagaagttatggacaatggaagcgatatccttgttagatgtagtatctgttaagactcgttgtcagatgacctctctattaaacggagacaatcaatcaatagatgtcagtaaaccagtaaaattgtctgaaggtatagatgaagtaaaagcagattatagcttagcaattaaaatgcttaaagagataagagatgcctataaaaacattggccataaactcaaagaaggtgaaacatatatatcaagagatctccaatttataagtaaggtgattcaatctgagggggtcatgcatcctacccccataaaaaagatattaagggtaggtccctggataaatacaatactagatgacattaaaaccagtgcagaatcaatagggagtctgtgtcaagaactagagttcagaggagaaagtatgctagttagcttgatattaaggaatttctggctgtataacttatacatgcatgagtcaaaacagcatccgttagctggaaaacaactgtttaagcaattgaacaaaacactaacatctgtgcaaagattttttgagctgaagaaagaaaatgatgtggttgacctatggatgaatataccaatgcagtttggagggggagacccagtagttttttacagatctttttacagaaggactcctgatttcctgactgaagcaatcagccatgtggatttactgttaaaagtttcgaacaatattaaaaatgagactaagatacgattctttaaagccttattatctatagaaaagaatgaacgtgcaacattaacaacactaatgagagacccccaggcggtaggatcggaaagacaagctaaggtaacaagtgatataaatagaacagcagttactagcatactgagtctatctccgaatcagctcttttgtgatagtgctatacactatagcagaaatgaagaagaagtcgggatcattgcagacaacataacacctgtttatcctcacggattgagagtgctctatgaatcactaccttttcataaggctgaaaaggttgtcaatatgatatcaggtacaaagtctataactaacctattgcagagaacatctgctatcaatggtgaagatattgatagagcagtgtctatgatgttagagaacttagggttgttatctaggatattgtcagtaataattaatagtatagaaataccaattaagtccaatggcagattgatatgctgtcaaatttctaagactttgagagaaaaatcatggaacaatatggaaatagtaggagtgacatctccaagtattgtaacatgtatggatgttgtgtatgcaactagttctcatttaaaaggaataattattgaaaaattcagtactgacaagaccacaagaggtcagaggggaccaaaaagcccctgggtaggatcaagcactcaagagaaaaaattagttcctgtttataatagacaaattctttcaaaacaacaaaaggagcaactggaagcaataggaaaaatgaggtgggtgtataaaggaactccagggctaagaagattgctcaataagatttgcataggaagtttaggtattagctataaatgtgtaaaacctctattaccaagattcatgagtgtaaacttcttacataggttatctgttagtagcagacccatggaattcccagcttctgttccagcttataggacaacaaattaccactttgacactagtccaatcaaccaagcattaagtgagaggttcgggaacgaagacattaatctagtgttccaaaatgcaatcagctgcggaattagtataatgagtgttgtagaacagttaactggtagaagcccaaaacaattagtcttaatcccccaattagaagagatagatattatgcctcctcctgtatttcaaggaaaattcaattataaactagttgataaaataacctctgatcaacacatcttcagtcctgacaaaatagacatattaacactagggaagatgcttatgcctactataaaaggtcaaaaaactgatcagttcttaaataagagagaaaactatttccatggaaataatttaattgaatctttatctgcagcacttgcatgccactggtgtggaatattaacagaacagtgtgtagaaaacaatatctttaggaaagactggggtgatgggttcatatcagatcatgccttcatggatttcaagatatttctatgtgtatttaaaaccaaacttttatgtagttggggatcccaagggaaaaatgtaaaagatgaagatataatagatgaatccattgacaaattattaagaattgacaacactttttggagaatgttcagcaaagtcatgtttgaatcaaaggtcaaaaaaagaataatgttatatgatgtaaaattcctatcattagtaggttatataggatttaaaaactggtttatagagcagttaagagtagtagaattgcatgaagtgccctggattgtcaatgctgaaggggagctagttgaaattaaaccaatcaaaatttatttgcagttaatagaacaaagtctatctttaagaataactgttttgaattatacagacatggcacatgctcttacacgattaattaggaagaaattgatgtgtgataatgcactcttcaatccaagttcatcaccaatgtttagtctaactcaagttatcgatcctacaacacagctagactattttcctaaggtgatatttgaaaggttaaaaagttatgataccagttcagactacaacaaagggaagttaacaagaaattacatgacattattaccatggcagcacgtaaacaggtataattttgtctttagttcaacaggatgtaaaatcagcttgaagacatgcatcgggaaattgataaaggacttaaaccctaaggttctttactttattggagaaggagcaggtaactggatggcaagaacagcatgtgagtatcctgacataaaatttgtatataggagtttaaaggatgatcttgatcatcattacccattagaatatcaaagggtaataggtgatttaaatagggtaatagatggtggtgaaggactatcaatggagaccacagatgcaactcaaaagactcattgggacttaatacacagaataagtaaagatgctttattgataacattgtgtgatgcagaattcaaaaacagagatgatttctttaaaatggtaattctttggagaaaacatgtattatcatgtagaatctgtacagcttatggaacagatctttacttatttgcaaagtatcatgcgacggactgcaatataaaattaccattttttgtaaggtctgtagctacttttattatgcaaggaagcaaattgtcaggatcagaatgttacatacttttaacattaggtcatcacaataatctgccatgccatggagaaatacaaaattccaaaatgagaatagcagtgtgtaatgatttccatgcctcaaaaaaactagacaacaaatcaattgaagctaactgtaaatctcttctatcaggattaagaataccaataaacaaaaaagagttaaatagacaaaagaaactgttaacactacaaagcaatcattcttccatagcaacagttggcggcagtaagattatagaatccaaatggttaaagaataaagcaagtacaataattgattggttagagcatatcttgaattctccaaaaggtgaattaaactatgatttctttgaagcattagagaacacataccccaatatgatcaagcttatagataacctgggaaatgcagagataaaaaaactaatcaaagttcctgggtatatgcttgtgagtaagaagtaataataat

SEQ ID NO: 98 - DNA, 907 bp, Human metapneumo virus
atggaggtgaaagtggagaacattcgaacaatagatatgctcaaagcaagagtaaaaaatcgtgtggcacgcagcaaatgctttaaaaatgcctctttggtcctcataggaataactacattgagtattgccctcaatatctatctgatcataaactataaaatgcaaaaaaacacatctgaatcagaacatcacaccagctcatcacccatggaatccagcagagaaactccaacggtccccacagacaactcagacaccaactcaagcccacagcatccaactcaacagtccacagaaggctccacactctactttgcagcctcagcaagctcaccagagacagaaccaacatcaacaccagatacaacaaaccgcccgcccttcgtcgacacacacacaacaccaccaagcgcaagcagaacaaagacaagtccggcagtccacacaaaaaacaacccaaggacaagctctagaacacattctccaccacgggcaacgacaaggacggcacgcagaaccaccactctccgcacaagcagcacaagaaagagaccgtccacagcatcagtccaacctgacatcagcgcaacaacccacaaaaacgaagaagcaagtccagcgagcccacaaacatctgcaagcacaacaagaatacaaaggaaaagcgtggaggccaacacatcaacaacatacaaccaaactagttaacaaaaaatacaaaataactctaagataaaccatgcagacaccaacaatggagaagccaaaagacaattcacaatctccccaaaaaggcaacaacaccatattagctctgcccaaatctccctggaaaaaacactcgcccatataccaaaaataccacaaccaccccaagaaaaaaactgggcaaaacaacacccaa

SEQ ID NO: 99 - DNA, 908 bp, Human metapneumo virus
atggaggtgaaagtggagaacattcgaacaatagatatgctcaaagcaagtgtaaaaaatcgtgtggcacgcagcaaatgctttaaaaatgcctctttggtcctcataggaataactacattgagtattgccctcaatatctatctgatcataaactataaaatgcaaaaaaacacatctgaatcagaacatcacaccagctcatcacccatggaatccagcagagaaactccaacggtccccacagacaactcagacaccaactcaagcccacagcatccaactcaacagtccacagaaggctccacactctactttgcagcctcagcaagctcaccagagacagaaccaacatcaacaccagatacaacaaaccgcccgcccttcgtcgacacacacacaacaccaccaagcgcaagcagaacaaagacaagtccggcagtccacacaaaaaacaacccaaggacaagctctagaacacattctccaccacgggcaacgacaaggacggcacgcaggaaccaccactctccgcacaagcagcacaagaaagagaccgtccacagcatcagtccaacctgacatcagcgcaacaacccacaaaaacgaagaagcaagtccagcgagcccacaaacatctgcaagcacaacaagaatacaaaggaaaagcgtggaggccaacacatcaacaacatacaaccaaactagttaacaaaaaatacaaaataactctaagataaaccatgcagacaccaacaatggagaagccaaaagacaattcacaatctccccaaaaaggcaacaacaccatattagctctgcccaaatctccctggaaaaaacactcgcccatataccaaaaataccacaaccaccccaagaaaaaaactgggcaaaacaacacccaa

SEQ ID NO: 100 - DNA, 907 bp, Human metapneumo virus
atggaggtgaaagtggagaacattcgaacaatagatatgctcaaagcaagagtaaaaaatcgtgtggcacgcagcaaatgctttaaaaatgcctctttggtcctcataggaataactacactgagtattgccctcaatatctatctgatcataaactataaaatgcaaaaaaacacatctgaatcagaacatcacaccagctcatcacccatggaatccagcagagaaactccaacggtccccacagataattcagacaccaactcaagcccacaacatccaactcaacagtccacagaaggctccacactctactttgcagcctcagcaaactcaccagagacagaaccaacatcaacaccagacacaacaaaccgcccgcccttcgtcgacacacacacaacaccaccaagcgcaagcagaacaaagacaagtccggcagtccacacaaaaaacaacccaaggataagctccagaacacactctccaccatgggcaacgacaaggacggcacgcagaaccaccactctccgcacaagcagcacaagaaagagaccgtccacagcatcagcccaacccgacatcagcgcaacaacccacaaaaacgaagaagcaagtccagcgagcccacaaacatctgcaagcacaacaagaacacaaaggaaaagcgtggaggccaacacatcaacaacatacaaccaaactagttaacaaaaaatacaaaataactctaagataaaccatgcagacaccaacaatggagaagtcaaaagacaattcacaatctccccaaaaaggcaacaacaccatattagctctgcccaaatctccctggaaaaaacactcgcccatataccaaaaataccacaaccaccccaagaaaaaaactgggcaaaacaacacccaa

SEQ ID NO: 101 - DNA, 907 bp, Human metapneumo virus
atggaggtgaaagtggagaacattcgaacaatagatatgctcaaagcaagagtaaaaaatcgtgtggcacgcagcaaatgctttaaaaatgcctctttggtcctcataggaataactacattgagtattgccctcaatatctatctgatcataaactataaaatgcaaaaaaacacatctgaatcagaacatcacaccagctcatcacccatggaatccagcagagaaactccaacggtccccacagataattcagacaccaactcaagcccacaacatccaactcaacagtccacagaaggctccacactctactttgcagcctcagcaaactcaccagagacagaaccaacatcaacaccagacacaacagaccgcccgcccttcgtcgacacacacacaacaccaccaagcgcaagcagaacaaagacaagtccggcagtccacacaaaaaacaacccaaggataagctccagaacacattctccaccatgggcaacgacaaggacggcacgcagaaccaccactctccgcacaagcagcacaagaaagagaccgtccacagcatcagtccaacccgacatcagcgcaacaacccacaaaaacgaagaagcaagtccagcgagcccacaaacatctgcaagcacaacaagaacacaaaggaaaagcgtggaggccaacacatcaacaacatacaaccaaactagttaacaaaaaatacaaaataactctaagataaaccatgcagacaccaacaatggagaagtcaaaagacaattcacaatctccccaaaaaggcaacaacaccatattagctctgcccaaatctccctggaaaaaacactcgcccatataccaaaaataccacaaccaccccaagaaaaaaactgggcaaaacaacacccaa

SEQ ID NO: 102 - DNA, 907 bp, Human metapneumo virus
atggaggtgaaagtggagaacattcgaacaatagatatgctcaaagcaagagtaaaaaatcgtgtggcacgcagcaaatgctttaaaaatgcctctttggtcctcataggaataactacattgagtattgccctcaatatctatctgatcataaactataaaatgcaaaaaaacacatctgaatcagaacatcacaccagctcatcacccatggaatccagcagagaaactccaacggtccccacagataattcagacaccaactcaagcccacaacatccaactcaacagtccacagaaggctccacactctactttgcagcctcagcaagctcaccagagacagaaccaacatcaacaccagacacaacagaccgcccgcccttcgtcgacacacacacaacaccaccaagcgcaagcagaacaaagacaagtccggcagtccacacaaaaaacaacccaaggataagctccagaacacattctccaccatgggcaacgacaaggacggcacgcagaaccaccactctccgcacaagcagcacaagaaagagaccgtccacagcatcagtccaacccgacatcagcgcaacaacccacaaaaacgaagaagcaagtccagcgagcccacaaacatctgcaagcacaacaagaacacaaaggaaaagcgtggaggccaacacatcaacaacatacaaccaaactagttaacaaaaaatacaaaataactctaagataaaccatgcagacaccaacaatggagaagtcaaaagacaattcacaatctccccaaaaaggcaacaacaccatattagctctgcccaaatctccctggaaaaaacactcgcccatataccaaaaataccacaaccaccccaagaaaaaaactgggcaaaacaacacccaa

SEQ ID NO: 103 - DNA, 907 bp, Human metapneumo virus
atggaggtgaaagtggagaacattcgaacaatagatatgctcaaagcaagagtgaaaaatcgtgtggcacgcagcaaatgctttaaaaatgcctctttgatcctaataggaataactacattgagtatagccctcaatatctatctgatcataaactatacaatgcaagaaaacacatccgaatcagaacatcacaccagctcatcacccatggaatccagcagggaaactccaacggtccccatagacaactcagacaccaatccaggctcacagtatccaactcaacagtccacagaagactccacactccactctgcagcttcagcaagctcaccagagacagaaccaacatcaacaccagacacaacaagccgcccgcccttcgtcgacacacacacaacaccaccaagtgcaagcaggacaaggacaagtccggcagtccacacaaaaaacaatccaagggtaagccccagaacacattccccaccatgggcaatgacaaggacggtccgcggaaccaccactctccgcacaagcagcacaagaaaaagactgtctacagcatcagtccaacccgacagcagcgcaacaacccacaaacacgaagaaacaagcccagtgagcccacaaacatctgcaagcacagcaagaccacaaaggaagggcatggaggccagcacatcaacaacatacaaccaaactagttaacaaaaaatacaaaataactctaagataaaccatgtagacaccaacaattgagaagccaaaaggcaattcacaatctcccaaaaaagcaacaacaccatattagctccgcttaaatctccctgaaaaaaacactcacccatataccaactataccacaaccatcccaagaaaaaaggctgggcaaaacaacacccaa

SEQ ID NO: 104 - DNA, 908 bp, Human metapneumo virus
atggaggtgaaagtggagaacattcgaacaatagatatgctcaaagcaagagtgaaaaatcgtgtggcacgcagcaaatgctttaaaaatgcctctttgatcctaataggaataactacattgagtatagccctcaatatctatctgatcataaactatacaatgcaagaaaacacatccgaatcagaacatcacaccagttcatcacccatggaatccagcagggaaactccaacggtccctatggacaactcagacaccaatccaggctcacagtatccaactcaacagtccacagaaggctccacactccactttgcagcctcagcaagctcaccagagacagaaccaacatcaacaccagacacaacaagccgcccgcccttcgtcgacacacacacaacaccatcaagtgcaagcagaacaaagacaagtccggcagtccacacaaaaaacaatctaaggataagccccagaacacattccccaccatgggcaatgacaaggacggtccgtggaaccaccactctccgcacaagcagcataagaaaaagaccgtccacagcatcagtccaacctgacagcagcgcaacaacccacaaacacgaagaagcaagcccagtgagcccgcaagcatctgcaagcacagcaagaccacaaaggaagggcatggaggccagcacatcaacaacatacaaccaaactagttaacaaaaaatataaaataactctaagataaaccatgtagacaccaacaattgagaagccaaaaggcaattcacaatctccccaaaaaggcaacaacaccatattagctccgcttaaatctccctggaaaaaacactcgcccatataccaactataccacaaccatcccaaggaaaaaagctgggtaaaacaacacccaa

SEQ ID NO: 105 - DNA, 908 bp, Human metapneumo virus
atggaggtgaaagtggagaacattcgaacaatagatatgctcaaagcaagagtgaaaaatcgtgtggcacgcagcaaatgctttaaaaatgcctctttgatcctaataggaataactacattgagtatagccctcaatatctatctgatcataaactatacaatgcaagaaaacacatccgaatcagaacatcacaccagctcatcacccatggaatccagcagagaaactccaacggtccctatggacaactcagacaccaatccaggctcacagtatccaactcaacagtccacagaaggctccacactccactttgcagcctcagcaagctcaccagagacagaaccaacatcaacaccagacacaacaagccgcccgcccttcgtcgacacacacacaacaccatcaagtgcaagcagaataaggacaagtccggcagtccacacaaaaaacaatctaaggataagccccagaacacattccccaccatgggcaatgacaaggacggtccgtggaaccaccactctccgcacaagcagcataagaaaaagaccgtccacagcatcagtccaacctgacagcagcgcaacaacccacaaacacgaagaagcaagcccagtgagcccgcaagcatctgcaagcacagcaagaccacaaaggaagggcatggaggccagcacatcaacaacatacaaccaaactagttaacaaaaaatatacaataactctaagataaaccatgtagacaccaacaattgagaagccaaaaggcaattcacaatctccccaaaaaggcaacaacaccatattagctccgcttaagtctccctggaaaaaacactcgcccatataccaactataccacaaccatccaaagaaaaaaagctgggcaaaacaacacccaa

SEQ ID NO: 106 - DNA, 888 bp, Human metapneumo virus
atggaggtgaaagtagagaacattcgagcaatagacatgctcaaagcaagagtgaaaaatcgtgtggcacgtagcaaatgctttaaaaatgcttctttaatcctcataggaataactacactgagtatagctctcaatatctatctgatcataaactacacaatacaaaaaaccacatccgaatcagaacaccacaccagctcaccacccacagaacccaacaaggaagcttcaacaatctccacagacaacccagacatcaatccaagctcacagcatccaactcaacagtccacagaaaaccccacactcaaccccgcagcatcagcgagcccatcagaaacagaaccagcatcaacaccagacacaacaaaccgcctgtcctccgtagacaggtccacagcacaaccaagtgaaagcagaacaaagacaaaaccgacagtccacacaatcaacaacccaaacacagcttccagtacacaatccccaccacggacaacaacgaaggcaatccgcagagccaccactttccgcatgagcagcacaggaaaaagaccaaccacaacattagtccagtccgacagcagcaccacaacccaaaatcatgaagaaacaggttcagcgaacccacaggcgtctgcaagcacaatgcaaaactagcacaccaataatataaaaccaaattagttaacaaaaaatgcgagatagctctaaagcaaaacatgtaggtaccaacaatcaagaaaccaaaagacaactcacaatctccctaaaacagcaacgacaccatgtcagctttgctcaaatctctctgggagaaacttctacccacatactaacaacatcacaaccatctcaagaaaagaaactgggcaaaacagcatccaa

SEQ ID NO: 107 - DNA, 888 bp, Human metapneumo virus
atggaggtgaaagtagagaacattcgagcaatagacatgctcaaagcaagagtgaaaaatcgtgtggcacgcagcaaatgctttaaaaatgcttctttaatcctcataggaataactacactgagtatagccctcaatatctatctgatcataaactacacaatacaaaaaaccacatctgaatcagaacaccacactagctcaccacccacagaatccaacaaagaaacttcaacaatccccatagacaacccagacatcaatccaaactcacagcatccaacccaacagtccacagaaagccccacactcaaccccgcagcctcggtgagcccatcagaaacagaaccagcatcaacaccagacacaacaaaccgcctgtcctccgtagacagatccacaacacaaccaagtgaaagcagaacaaagacaaaaccaacagtccacacaaaaaacaatccaagtacagtttccagaacacaatccccactacgggcaacaacgaaggcggtcctcagagccaccgctttccgcacgagcagcacaagaaaaagaccaaccacaacatcagtccagtctgacagcagcaccacaacccaaaatcatgaagaaacaagttcagcgaacccacaggcatctgcaagcacaatgcaaagccagcacaccaacaacataaaaccaaattagttaacaaaaaatacgagatagctctaaagtaaaacatgtaggtaccaacaatcaaggaatcaaaagacaactcacaatctccctaaaacagcaacaacatcatgtcagttttgctcaaatctccctgggagaaactttcgcccacatactaacaacatcacaaccatctcaagaaaagaaactgggcaaaacagcacccaa

SEQ ID NO: 108 - DNA, 888 bp, Human metapneumo virus
atggaggtgaaagtagagaacatccgagcagtagacatgctcaaagcaagagtcaaaaatcgtgtggcacgcagcaaatgctttaaaaatgcctccttaatcctcgtaggaataactacactgagcatagccctcaatatctatctgatcgtaaactacacaatacaaaaaaccacatccgaatcagaacaccacaccagctcatcacccacagaatccaacaaaggaacttcaacaatccccacagacaacccagacatcaatccaaattcacaacatccaactcaacagtccacagaaagccccacactcaacaccgcagcctcggtgagcccatcagaaacagaaccagcatcaacaccagacacaacaaaccgcctgtcctccgcagacagatccacaacacaaccaagtgaaagcagaacaaagacaaagctgacagtccacacaaaaaacaacctaagtacagcctccagaacacaatcaccaccacgggcaacaacgaaggcggtcctcagagacaccgccttccacacgagcagcacaggaaaaagaccaaccacaacatcagtccagtctggcagcagcaccacaactcaaaatcatgaagaaacaagttcatcgaacccacaggcatctgcaagcacaatgcaagaccaggacaccaacaatacaaaacaaaattagttaacaaaaaatacaagatagctctaaagtaaaacatgtaggtaccaacagtaaagaaatcaaaagacaactcacaatctccccaaaacagcaacaacatcatgtcagcttcgctcaaatctccctgggagaaactctcgcccacatactaacaacatcacaactatctcaagaaaagaaactgggcaaaaaaacactcaa

SEQ ID NO: 109 - DNA, 887 bp, Human metapneumo virus
atggaggtgaaagtagagaacatccgagcagtagacatgctcaaagcaagagttaaaaatcgtgtggcacgcagcaaatgctttaaaaatgcctctttaatcctcgtaggaataactacactgagtatagccctcaatatctatctgatcgtaaactacacaatacaaaaaaccacatccgaatcagaacaccacactagctcatcacccacagaatccaacaaaggaacttcaacaatcccacagacaacccagacatcaatccaaattcacaacatccaactcaacagtccacagaaagccccacactcaacaccgcagcctcggtgagcccatcagaaacagaaccagcatcaacaccagacacaacaaaccgcctgtcctccgcagacagatccacaacacaaccaagtgaaagcagaacaaagacaaagctgacagtccacacaaaaaacaacctaagtacagcctccagaacacaatcaccaccacgggcaacaacgaaggcggtcctcagagacaccgccttccacacgagcagcacaggaaaaagaccaaccacaacatcagtccagtctggcagcagcaccacaactcaaaatcatgaagaaacaagttcatcgaacccacaggcatctgcaagcacaatgcaagaccaggacaccaacaatacaaaacaaaattagttaacaaaaaatacaagatagctctaaagtaaaacatgtaggtaccaacagtaaagaaatcaaaagacaactcataatctccccaaaacagcaacaacatcatgtcagcttcgctcaaatctccctgggagaaactctcgcccacatactaacaacatcacaactatctcaagaaaagaaactgggcaaaaaaacactcaa

SEQ ID NO: 110 - DNA, 888 bp, Human metapneumo virus
atggaggtgaaagtagagaacattcgagcaatagacatgctcaaagcaagaatgaaaaatcgtgtggcacgcagcaaatgctttaaaaatgcttctttaatcctcataggaataactactctgagtatagccctcaatatctatctgatcataaactacacaatacaaaaaaccacatctgaatcagaacaccacactagctcaccacccacagaatccaacaaagaaacttcaacaatccctatagacaacccagacatcaatccaaactcacagcatccaactcaacagtccacagaaagcctcacactcaaccccgcagcctcggtgagcccatcagaaacagaaccagcatcaacaccagacacaacaaaccgcctgtcctccgtagacagatccacaacacaaccaagtgaaagcagaacaaagacaaaactgacagtccacaaaaaaaacatcccaagtacagtctctagaacacaatcctcaatacgggcaacaacgaaggcggtcctcagagccaccgcctttcgcacgagcagcacaggagaaagaccaactacaacatcagtccagtctgacagcagcaccacaacccaaaatcatgaagaaacaggttcagcgaacccacaggcatctgcaagcacaatgcaaaactagcacaccaacattgtaaaaccaaattagttaacaaaaaatatgaaatagctctaaagtaaaacatgtaggtgctaacaatcaagaaatcaaaagacatctcataatctctccaaaacagcaacaacatcatgtcaactttgctcaaatctccctgggagaaactttcgcccccatactgacaacatcacaatcatctcaagaaaagaaactgggcaaaacagcaccaaa

SEQ ID NO: 111 - DNA, 888 bp, Human metapneumo virus
atggaggtgaaagtagagaacattcgagcaatagacatgctcaaagcaagagtgaaaaatcgtgtggcacgcagcaaatgctttaaaaatgcttctttaatcctcataggaataactactctgagtatagccctcaacatctatctgatcataaactacacaatacaaaaaaccacatctgaatcagaacaccacactagctcaccacccacagaatctaacaaagaaacttcaacaatctctatagacaacccagacatcaatccaaactcacagcatccaactcaacagtccacagaaagcctcacactcagccccacagcctcggtgagcccatcagaaacagaaccagcatcaacatcagacacaacaagccgcctgtcttccgtagacagatccacaacacaaccaagtgaaagcagagcaaggacaaaaccgacagtccacaagaaaaacatcccaagtacagtttctagaacacaatccccactacgggcaacaacgaaggcggtcctcagagccaccgcctttcgcacgagcagcacaggagagggaccaaccacaacatcggtccagtctgacagcagcaccacaacccaaaatcatgaagaaacaggttcagcgaacccacaggcatctgcaagcacaatgcaaaactagcacaccaacattgtaaaaccaaattagttaacaaaaaatatgaaatagttctaaagtaaaacatgtaggtgctaacaatcaagaaatcaaaagacaactcataatctccctaaaacagcaacaacatcatgtcaactttgctcaaatctccctgggagaaactttcgcccccatactgacaacatcacaatcatctcaagaaaagaaactgggcaaaacagcaccaaa

SEQ ID NO: 112 - DNA, 888 bp, Human metapneumo virus
atggaggtgaaagtagagaacattcgagcaatagacatgctcaaagcaagagtgaaaaatcgtgtggcacgtagcaaatgctttaaaaatgcttctttaatcctcataggaataactacactgagtatagctctcaatatctatctgatcataaactacacaatacaaaaaaccacatctgaatcagaacaccacaccagctcaccacccacagaatccaacaaggaagcttcaacaatctccacagacaatccagacatcaatccaaactcacagcatccaactcaacagtccacagaaaaccccacactaaaccccgcagcatcggtgagctcatcagaaacagaaccagcatcaacaccagacacaacaaaccgcctgtcctccgtagacaggtccacagcacaaccaagtgaaagcagaacaaagacaaaaccgacagtccacacaagaaacaacccaagcacagcttccagcacacaatccccaccacgggtaacaacgaaggcaatcctcagagccaccgtcttccgcatgagcagcacaggaaaaagaccagccacaacattagtccagtccgacagcagcaccacaacccaaaatcatgaagaaacaggttcagcaaactcacaggcatctgcaagcacaatgcaaaactagcactccaacaatataaaaccaaattagttaacaaaaaatacgagatagctctaaagtaaaacatgtaggcaccaacaatcaggaaattaaaagacaactcacaacctccctaaaacagcaacgacaccatgtcaactttgctcaaatctctctgggagaaacttttgcccacatactaacaacatcacaatcatctcaagaaaagaaactgggcaaaacagcatccaa

SEQ ID NO: 113 - DNA, 888 bp, Human metapneumo virus
atggaggtgaaagtagagaacattcgagcaatagacatgctcaaagcaagagtgaaaaatcgtgtggcacgcagcaaatgctttaaaaatgcttctttaatcctcataggaataactactctgagtatagccctcaacatctatctgatcataaactacacaatacaaaaaaccacatctgaatcagaacaccacactagctcaccacccacagaatctaacaaagaaacttcaacaatctctatagacaactcagacatcaatccaaactcacagcatccaactcaacagtccacagaaagcctcacactcagccccacagcctcggtgagcccatcagaaacagaaccagcatcaacatcagacacaacaaaccgcctgtcttccgtagacagatccacaacacaaccaagtgaaagcagagcaagaacaaaaccgacagtccacaagaaaaacatcccaagtacagtttctagaacacaatccccactacgggcaacaacgaaggcggtcctcagagccaccgcctttcgcatgagcagcacaggagagggaccaaccacaacatcggtccagtctgacagcagcaccacaacccaaaatcatgaagaaacaggctcagcgaacccacaggcatctgcaagcacaatgcaaaaccagcacaccaacattgcaaaaccaaattagttaacaaaaaatatgaaatagttctaaagtaaaacatgtaggtgccaacaatcaagaaatcaaaagacaactcacaatctccctaaaacagcaacaacatcatgccaactttgctcaaatctccctgggagaaaccctcgcccccatactgacaacatcacaatcatctcaagaaaagaaactgggcaaaacagcaccaaa

SEQ ID NO: 114 - DNA, 888 bp, Human metapneumo virus
atggaggtgaaagtagagaacattcgagcaatagacatgctcaaagcaagagtgaaaaatcgtgtggcacgcagcaaatgctttaaaaatgcttctttaatcctcataggaataactactctgagtatagccctcaatatctatctgatcataaactacacaatacaaaaaaccacatctgaatcagaacaccacactagctcaccacccacagaatctaacaaggaaacttcaacaatccctatagacaacccagacatcaatccaaactcacagcatccaactcaacagtccacagaaagcctcacactctaccccacatcctcggtgagctcatcagaaacagaaccagcatcaacaccaggcataacaaaccacctgtcctttgtagacagatccacaacacaaccaagtgaaagcagaacaaagacaaaccggacagtccacaaaaaaaacatctcaagtacagtttctagaacacagtccccaccacggacaacagcgaaggcggtccccagagccaccgcccttcgcacgagcagcacaggagaaagaccaaccacaacaccagtccagcccgatagcagcaccacaacacaaaatcatgaagaaacaggctcagcgaacccacaggcatccgcaagcacaatgcaaaaccagcacaccaacattgcaagaccaaattagttaacaaaaaatatgaaatagctctaaagtaaaacatgtaggtgccaacaatcaagaaatcaaaagataactcataatctctctaaaacatcaacaacatcatgttaactttgctcaaatctctctgggagaaaccttcgcccccatactggcaacatcacaatcatctcaagaaaagaaactgggcaaaacaacaccaaa

SEQ ID NO: 115 - DNA, 888 bp, Human metapneumo virus
atggaggtgaaagtagagaacattcgagcaatagacatgctcaaagcaagagtgaaaaatcgtgtggcacgcagcaaatgctttaaaaatgcttctttaatcctcataggaataactactctgagtatagccctcaatatctatctgatcataaactacacaatacaaaaaaccacatctgaatcagaacaccacactagctcaccacccacagaatctaacaaggaaacttcaacaatccctatagacaacccagacatcaatccaaactcacagcatccaactcaacagtccgcagaaagcctcacactctaccccacatcctcggtgagctcatcagaaacagaaccagcatcaacaccaggcataacaaaccacctgtcctttgtagacagatccacaacacaaccaagtgaaagcagaacaaagacaaaccggacagtccacaaaaaaaacatctcaagtacagtttctagaacacagtccccaccacggacaacagcgaaggcggtccccagagccaccgcccttcgcacgagcagcacaggagaaagaccaaccacaacaccagtccagcccgatagcagcaccacaacacaaaatcatgaagaaacaggctcagcgaacccacaggcatccgcaagcacaatgcaaaaccagcacaccaacattgcaagaccaaattagttaacaaaaaatatgaaatagctctaaagtaaaacatgtaggtgccaacaatcaagaaatcaaaagataactcataatctctctaaaacatcaacaacatcatgttaactttgctcaaatctctctgggagaaaccttcgcccccatactggcaacatcacaatcatctcaagaaaagaaactgggcaaaacaacaccaaa

SEQ ID NO: 116 - DNA, 888 bp, Human metapneumo virus
atggaggtgaaagtagagaatattcgagcaatagacatgctcaaagcaagagtgaaaaatcgtgtggcacgcagcaaatgctttaaaaatgcttctttaatcctcataggaataactactctgagtatagccctcaatatctatctgatcataaactacacaatacaaaaaaccacatctgaatcagaacaccacactagctcaccacccacagaatctaacaaggaaacttcaacaatccctatagacaacccagacatcaatccaaactcacagcatccaactcaacagtccacagaaagcctcacactctaccccacatcctcggtgagctcatcagaaacagaaccagcatcaacaccaggcataacaaaccacctgtcctttgtagacagatccacaacacaaccaagtgaaagcagaacaaagacaaaccggacagtccacaaaaaaaacatctcaagtacagtttctagaacacagtccccaccacggacaacagcgaaggcggtccccagagccaccgcccttcgcacgagcagcacaggagaaagaccaaccacaacaccagtccagcccgatagcagcaccacaacacaaaatcatgaagaaacaggctcagcgaacccacaggcatccgcaagcacaatgcaaaaccagcacaccaacattgcaagaccaaattagttaacaaaaaatatgaaatagctctaaagtaaaacatgtaggtgccaacaatcaagaaatcaaaagataactcataatctctctaaaacatcaacaacatcatgttaactttgctcaaatctctctgggagaaaccttcgcccccatactggcaacatcacaatcatctcaagaaaagaaactgggcaaaacaacacccaa

SEQ ID NO: 117 - DNA, 888 bp, Human metapneumo virus
atggaggtgaaagtagagaacattcgagcaatagacatgctcaaagcaagagtgaaaaatcgtgtggcacgtagcaaatgctttaaaaatgcttctttaatcctcataggaataactacactgagcatagccctcaatatctatctgatcataaactacacaatacaacaaaccacatctgaatcagaacaccacaccagctcaccacccacagaatccaacaaggaagcttcaacaatctccacagacaacccagacatcaatccaaactcacagcatccaactcaacagtccacagaaaaccccacactcaacccagcagcatcagcgagcccatcagaaacagaatcagcatcaacaccagatacaacaaaccgcctgtcctccgtagacaggtccacggtacaaccaagtgaaaacagaacaaagacaaaactgacagtccacacaagaaacaacctaagcacagcctccagtacacaatccccaccacgggcaacaacgaaggcaatccgcagagccaccaccctccgcatgagcagcacaggaagaagaccaaccacaacactagtccagtccgacagcagcaccacaacccaaaatcatgaagaaacaggctcagcgaacccacaggcatctgcaagcacaatgcaaaaccagcacaccaacaatataaaaccaaattagttaacaaaaaatacgagatagctctaaagtaaaacatgtaggcaccaacaatcaagaaaccaaaagataactcacaatccccccaaaacagcaacgacaccatgtcagctttgctcaaatctctctgggagaaacttttgcccacatactaacaacatcacaaccatctcaagaaaagaaactgggcaaaacagcatccaa

SEQ ID NO: 118 - DNA, 888 bp, Human metapneumo virus
atggaggtgaaagtagagaacattcgagcaatagacatgctcaaagcaagagtgaaaaatcgtgtggcacgtagcaaatgctttaaaaatgcttctttaatcctcataggaataactacactgagcatagccctcaatatctatctgatcataaactacacaatacaaaaaaccacatctgaatcagaacaccacaccagctcaccacccacagaatccaacaaggaagcttcaacaatctccacagacaacccagacatcaatccaaactcacagcatccaactcaacagtccacagaaaaccccacactcaacccagcagcatcagcgagcccatcagaaacagaatcagcatcaacaccagatacaacaaaccgcctgtcctccgtagacaggtccacggtacaaccaagtgaaaacagaacaaagacaaaactgacagtccacacaagaaacaacctaagcacagcctccagtacacaatccccaccacgggcaacaacgaaggcaatccgcagagccaccaccctccgcatgagcagcacaggaagaagaccaaccacaacactagtccagtccgacagcagcaccacaacccaaaatcatgaagaaacaggctcagcgaacccacaggcatctgcaagcacaatgcaaaaccagcacaccaacaatataaaaccaaattagttaacaaaaaatacgagatagctctaaagtaaaacatgtaggcaccaacaatcaagaaaccaaaagataactcacaatccccccaaaacagcaacgacaccatgtcagctttgctcaaatctctctgggagaaacttttgcccacatactaacaacatcacaaccatctcaagaaaagaaactgggcaaaacagcatccaa

SEQ ID NO: 119 - DNA, 901 bp, Human metapneumo virus
atggaagtaagagtggagaacattcgagcgatagacatgttcaaagcaaagataaaaaaccgtataagaagcagcaggtgctatagaaatgctacactgatccttattggactaacagcgttaagcatggcacttaatattttcctgatcatcgatcatgcaacattaagaaacatgatcaaaacagaaaactgtgctaacatgccgtcggcagaaccaagcaaaaagaccccaatgacctccacagcaggcccaaacaccaaacccaatccacagcaagcaacacagtggaccacagagaactcaacatccccagtagcaaccccagagggccatccatacacagggacaactcaaacatcagacacaacagctccccagcaaaccacagacaaacacacagcaccgctaaaatcaaccaatgaacagatcacccagacaaccacagagaaaaagacaatcagagcaacaacccaaaaaagggaaaaaggaaaagaaaacacaaaccaaaccacaagcacagctgcaacccaaacaaccaacaccaccaaccaaatcagaaatgcaagtgagacaatcacaacatccgacagacccagaactgacaccacaacccaaagcagcgaacagacaacccgggcaacagacccaagctccccaccacaccatgcatagagaggtgcaaaactcaaatgagcacaacacacaaacatcccatccaagtagttaacaaaaaaccacaaaataaccttgaaaaccaaaaaaccaaaacataaacccagacccagaaaaacatagacaccatatggaaggttctagcatatgcaccaatgagatggcatctgttcatgtatcaatagcaccaccatcattcaaggaataagaagaggcgaaaatttaa

SEQ ID NO: 120 - DNA, 901 bp, Human metapneumo virus
atggaagtaagagtggagaacattcgagcgatagacatgttcaaagcaaagataaagaaccgtataagaagcagcaggtgctatagaaatgctacactgatccttattggactaacagcgttaagcatggcacttaatattttcctgatcattgatcatgcaacattaagaaacatgatcaaaacagaaaactgtgctaacatgccatcggcagaaccaagcaaaaagaccccaatgacctccacagcaggcccaagcaccgaacccaatccacagcaagcaacacaatggaccacagagaactcaacatccccagcagcaaccctagagagccatccatacacagggacaacccaaacaccagacataacagctccccaacaaaccacagacaaacacacagcactgccaaaatcaaccaatgaacagatcacccagacaaccacagagaaaaagacaaccagagcaacaacccaaaaaagggaaaaagaaaaagaaaacacaaaccaaaccacaagcacagctgcaacccaaacaaccaacaccaccaaccaaaccagaaatgcaagtgagacaatcacaacatccgacagacccagaattgacaccacaacccaaagcagcgatcagacaacccgggcaacagacccaagctccccaccacaccatgcacagagtggtgcaaaacccaaatgaacacaacacacaaacatctcatccaagtagttaacaaaaaaccacaaaataaccttgaaaaccaaaaaaccaaaccacaaacttagacccagaaaaacatagacactatatggaaggtttgagcatatgcaccaatgaaatggtatctgttcatgtatcaatagcgccaccattatttaaggaataagaagaggcaaaaattcaa

SEQ ID NO: 121 - DNA, 860 bp, Human metapneumo virus
atggaagtaagagtggagaacattcgagcgatagacatgttcaaagcaaagataaaaaaccgtataagaagcagcaggtgctatagaaatgctacactgatccttattggactaacagcgttaagcatggcacttaatattttcctgatcatcgatcatgcaacattaagaaacatgatcaaaacagaaaattgtgctaacatgccgccggcagaaccaagcaaaaagaccccaatgacctctacagcaggcccaaacaccaaacccaatccacagcaagcaacacagtggaccacggagaactcaacattcccagcagcaacctcagagggccatctacacacagggacaactcaaacaccagacacaacagctcctcagcaaaccacagacaaacacacagcactgccaaaatcaaccaatgaacaaatcacccagacaaccacagagaaaaagacaaccagagcaacaacccaaagaagggaaaaagggaaagaaaacacaaaccaaaccacaagcacagctgctacccaaacaaccaacaccaccaaccaaatcagaaatgcaagcgagacaatcacaacatccgacagacccagaactgactccacaacccaaagcagcgaacagacaacccgggcaacagacccaagctccccaccacatcatgcacagggaagtgcaaaacccaaatgaacacaacacacaaacatcccatccaagtagttaacaaaaaatcagacccagaaaaacatagacactatatggaaggtccgagcatatgcaccgatgaaatggcatttgttcatgtatcaatagcgccaccattatttaaggaataagaagaggcaaaaattcaa

SEQ ID NO: 122 - DNA, 861 bp, Human metapneumo virus
atggaagtaagagtggagaacattcgagcgatagacatgttcaaagcaaagataaaaaaccgtataagaagcagcaggtgctatagaaatgctacactgatccttattggactaacagcgttaagcatggcacttaatattttcctgatcatcgatcatgcaacattaagaaacatgatcaaaacagaaaattgtgctaacatgccgccggcagaaccaagcagaaagaccccaatgacctccacagcaggcccaaacaccaaacccaatccacagcaagcaacacagtggaccacggagaactcaacatccccagcagcaaccccagagggccatctacacacagggacaactcaaacaccagacacaacagctcctcagcaaaccacagacaaacacacagcactgccaaaatcaaccaatgaacagatcacccaggcaaccacagagaaaaagacaaccagagaaacaacccaaagaagggaaaaaggaaaagaaaacacaaaccaaaccacaagcacagctgcaacccaaacaaccaacaccaccaaccaaatcagaaatgcaagcgagacaatcacaacatccgacagacccagaactgactccacaacccaaagcagcgaacagacaacccaggcaacagacccaagctccccagcacaccatgcacagggaagtgcaaaacccaaatgaacacaacacacaaacatcccatccaagtagttaacaaaaaaatcagacccagaaaaacacagacactatatggaaggtccgagcatatgcaccgatgaaatggcatctgttcatgtatcaatagcaccaccattatttaaggaataagaagaggcaaaaattcaa

SEQ ID NO: 123 - DNA, 860 bp, Human metapneumo virus
atggaagtaagagtggagaacattcgagcgatagacatgttcaaagcaaagataaaaaaccgtataagaagcagcaggtgctatagaaatgctacattgatccttattggactaacagcgttaagcatggcacttaatattttcctgatcatcgatcatgcaacattaagaaacatgatcaaaacagaaaattgtgctaacatgccaccggcagaaccaagcaaaaagaccccaatgacctccacagcaggcctaaacactaaacccaatccacagcaagcaacacagtggaccacggagaactcaacatccccagcagcaaccccagagggccatctacacacagggacaactcaaacaccagacacaacagctcctcagcaaaccacagacaagcacacagcactgccaaaatcaaccaatgaacagatcacccagacaaccacagagaaaaagacaaccagagcaacaacccaaagaagggaaaaaggaaaagaaaacacaaaccaaaccacaagcacagctgcaacccaaacaaccaacaccaccaaccaaatcagaaatgcaagcgagacaatcacaacatccgacagacccagaactgactccacaacccaaagcagcgaacagacaacccgggcaacagacccaagctccccaccacaccatgcacagggaagtgcaaaacccaaatgaacacaacacacaaacatcccatccaagtagttaacaaaaaatcagacccagaaaaacatagacactatatggaaggtccgagcatatgcaccgatgaaatggcatctgttcatgtatcaatagcgccaccattatttaaggaataagaagaggcaaaaattcaa

SEQ ID NO: 124 - DNA, 860 bp, Human metapneumo virus
atggaagtaagagtggagaacattcgagcgatagacatgttcaaagcaaagataaaaaaccgtataagaagcagcaggtgctatagaaatgctacactgatccttattggactaacagcgttaagcatggcacttaatattttcctgatcatcgatcatgcaacattaagaaacatgatcaaaacagaaaattgtgctaacatgccgccggcagaaccaagcaaaaagaccccaatgacctccacagcaggcccaaacaccaaacccaatccacagcaagcaacacagtggaccacggagaactcaacatccccagcagcaaccccagagggccatctacacacagggacaactcaaacaccagacacaacagctcctcagcaaaccacagacaaacacacagcactgccaaaatcaaccaatgaacagatcacccagacaaccacagagaaaaagacaaccagagcaacaacccaaagaagggaaaaaggaaaagaaaacacaaaccaaaccacaagcacagctgcaacccaaacaaccaacaccaccaaccaaatcagaaatgcaattgagacaatcacaacatccgacagacccagaactgactccacaacccaaagcagcgaacagacaacccgggcaacagacccaagctcccacccacaccatgcacagggaagtgcaaaacccaaatgaacacaacacacaaacatcccatccaagtagttaacaaaaaatcagacccagaaaaacatagacactatatggaaggtccgagcatatgcaccgatgaaatggcatctgttcatgtatcaatagcgccaccattatttaaggaataagaagaggcaagaattcaa

SEQ ID NO: 125 - DNA, 886 bp, Human metapneumo virus
atggaagtaagagtggagaacattcgggcaatagacatgttcaaagcaaaaatgaaaaaccgtataagaagtagcaagtgctatagaaatgctacactgatccttattggattaacagcattaagtatggcacttaatatttttttaatcattgattatgcaatgttaaaaaacatgaccaaagtggaacactgtgttaatatgccgccggtagaaccaagcaagaagaccccaatgacctctgcagtagacttaaacaccaaacccaatccacagcaggcaacacagttggccgcagaggattcaacatctctagcagcaacctcagaggaccatctacacacagggacaactccaacaccagatgcaacagtctctcagcaaaccacagacgagtacacaacattgctgagatcaaccaacagacagaccacccaaacaaccacagagaaaaagccaaccggagcaacaaccaaaaaagaaaccacaactcgaactacaagcacagctgcaacccaaacactcaacactaccaaccaaactagctatgtgagagaggcaaccacaacatccgccagatccagaaacagtgccacaactcaaagcagcgaccaaacaacccaggcagcagacccaagctcccaaccacaccatacacagaaaagcacaacaacaacatacaacacagacacatcctctccaagtagttaacaaaaaaactataaaataatcatgaaaaccgaaaaactagaaaagttaatttgaactcagaaaagaacacaaacactatatgaattgtttgagcgtatatactaatgaaatagcatctgtttgtgcatcaataataccatcattatttaagaaataagaagaagctaaaattcaa

SEQ ID NO: 126 - DNA, 889 bp, Human metapneumo virus
atggaagtaagagtggagaacattcggacaatagacatgttcaaagcaaagatgaaaaaccgtataagaagcagcaagtgctatagaaatgctacactgatccttattggactgacagcattaagtatggcacttaatattttcttgatcatcgattatgcaacatttaaaaacatgaccaaagtggaacactgtgctaatatgccgccggtagaaccgagtaagaagaccccaatgacctctacagtagactcaagcaccggacccaatccacagcagacaacacagtggaccacagaggattcaacatctctagcagcaacctcagaggaccatctacacacagggacaactccaacactagatgcaacagtttctcagcaaaccccagacaagcacacaacaccgctgagatcaaccaatggacagaccacccagacaaccacagagaaaaagccaaccagagcaatagccaaaaaagaaaccacaaaccaaaccacaagcacagctgcaacccaaacattcaacaccaccaatcaaaccagaaatggaagagagacaaccataacatctgccagatccagaaacgacgccacaactcaaagcagcgaacaaacaaaccagacaacagacccaagctcccaaccacatcatgcatagataagcacaataacaatatgaacacaacacagacacatcttctccaagtagttaacaaaaaactataaaataaccatgaaaaccaaaaaactagaaaagtaaatttgaactcagaaaagaacacaaacactaaatgaattgtttgagcatatatactaatgaaatagcatctgttcatgcatcaataataccatcattacttaagaaataagaagaagcaaaaattcaa

SEQ ID NO: 127 - DNA, 885 bp, Human metapneumo virus
atggaagtaagagtggagaacattcgggcaatagacatgttcaaagcaaagatgaaaaaccgtataagaagtagcaagtgctatagaaatgctacactgatccttattggattaacagcattaagtatggcacttaatatttttttaatcattgattatgcaatgttaaaaaacatgaccaaagtggaacactgtgttaatatgccgccggtagaaccaagcaagaagaccccaatgacctctgcagtagacttaaacaccaaactcaatccacagcaggcaacacagttgaccacagaggattcaacatctctagcagcaacctcggaggatcatttactcacagggacaactccaacaccagatgcaacagtctctcagcaaaccacagacgagcacacaacactgctgagatcaaccaacagacagaccacccaaacaaccacagagaaaaagccaaccggagcaacaaccaaaaaagaaaccacaactcgaaccacaagcacagctgcaacccaaacactcaacaccaccaaccaaactagcaatggaagagaggcaaccacaacatccaccagatccagaaacggtgccacaactcaaaacagcgatcaaacaacctagacagcagacccaagctcccaaccacaccatacacagaaaagcacaacaacaacatacaacacagacacatcttctccaagtagttaacaaaaaactataaaataaccatgaaaactaaaaaactagaaaagttaatttgaactcagaaaagaacacaaacactatatgaattgtttgagcgtatatactaatgaaatagcatctgtttgtgcatcaataataccatcattatttaagaaataagaagaagctaaaattcaa

SEQ ID NO: 128 - DNA, 885 bp, Human metapneumo virus
atggaagtaagagtggagaacattcgggcaatagacatgttcaaagcaaagatgaaaaaccgcataagaagtagcaagtgctatagaaatgctacactgatccttattggattaacagcattaagtatggcacttaatatttttttaatcattgattatgcaacattaaaaaacatgaccaaagtggaacactgtgttaatatgccgccggtagaaccaagcaagaagaccccaatgacctctgcagtagacttaaacaccaaactcaatccacagcaggcaacacagttgaccacagaggattcaacatctctagcagcaacctcagagggccatccacacacaggaacaactccaacaccagacgcaacagtctctcagcaaaccacagacgagcacacaacactgctgagatcaaccaacagacagaccacccaaacagccacagagaaaaagccaactggagcaacaaccaaaaaagaaaccacaacccgaactacaagtacagctgcaacccaaacacccaacaccaccaaccaaaccagcaatggaagagaggcaaccacaacatccgccaggtccagaaacggtgccacaactcaaaacagcgatcaaataacccaggcagcagactcaagctcccaaccacaccatacacagaaaagcacaacaacagcatacaacacagacacatcttttccaagtagttaacaaaaaactataaaataaccatgaaaaccaaaaaactagaaaagttaatttgaactcagaaaagaacacaaacactatatgaattgtttgagcgtatatactaatgaaatagcatctgtttgtgcatcaataataccatcattatttaagaaataagaagaagctaaaattcaa

SEQ ID NO: 129 - DNA, 886 bp, Human metapneumo virus
atggaagtaagagtggagaacattcgggcaatagacatgttcaaagcaaagatgaaaaaccgtataagaagtagcaagtgctatagaaatgctacactgatccttattggattaacagcactaagtatggcacttaatatttttttaatcattgattatgcaacattaaaaaacatgaccaaagtggaacactgtgttaatatgccgccggtagaaccaagcaagaagaccccaatgacctctgcagtagactcaaacaccaaacccaatccacagcaggcaacacagttgaccacagaggattctacatctttagcagcaaccctagaggaccatccacacacagggacaactccaacaccagatgcaacagtctctcagcaaaccacagacgagcacacaacactgctgagatcaaccaacagacagaccacccaaacaactgcagagaaaaagccaaccagggcaacaaccaaaaaagaaaccacaactcgaaccacaagcacagctgcaacccaaacactcaacaccaccaaccaaactagcaatggaagagaggcaaccacaacatctgccagatccagaaacaatgccacaactcaaagcagcgatcaaacaacccaggcagcagaaccaagctcccaatcacaacatacacagaaaagcacaacaacaacatacaacacagacacatcttctctaagtagttaacaaaaaaactataaaataaccatgaaaaccaaaaaactagaaaagttaatttgaactcagaaaagaacacaaacactatatgaattatttgagcgtatatactaatgaaatagcatctgtttgtgcatcaataataccatcattatttaagaaataagaagaagctaaaattcaa

SEQ ID NO: 130 - DNA, 887 bp, Human metapneumo virus
atggaagtaagagtggagaacattcgggcaatagacatgttcaaagcaaagatgaaaaaccgtataagaagtagcaagtgctatagaaatgctacactgatccttattggattatcagcactaagtatggcacttaatatttttttaatcattgattatgcaaaatcaaaaaacatgaccagagtggaacactgtgtcaatatgccgccggtagaaccaagcaagaagaccccaatgacctctgcagtagacttaaacaccaaacccaatccacagcgggcaacacagttgaccacagaggattcaacatctctagcagcaaccctagagggccatctacacacagggacaactccaacaccagatgtaacagtctctcagcaaaccacagacgagcacacaacactgctgagatcaaccaacagacagaccacccaaacagccgcagagaaaaagccaaccagagtaacaactaacaaagaaaccataactcgaaccacaagcacagccgcaacccaaacactcaacaccaccaaccaaaccaacaatggaagagaggcaaccacaacatctgccagatccagaaacaatgccacaactcaaagcagcgaccaaacaacccaggcagcagacccaagctcccaatcacaacatacacagaaaagcataacaacaacatacaacacagacacatcttctccaagtagttaacaaaaaaactataaaataaccatgaaaaccaaaaaaactagaaaagttaatttgaactcagaaaagaacacaaacactatatgaattgtttgagcgtatatactaatgaaatagcatctgtttgtgcatcaataataccatcattatttaagaattaagaagaagctaaaattcaa

SEQ ID NO: 131 - DNA, 887 bp, Human metapneumo virus
atggaagtaagagtggagaacattcgggcaatagacatgttcaaagcaaagatgaaaaaccgtataagaagtagcaagtgctatagaaatgctacactgatccttattggattatcagcactaagtatggcacttaatatttttttaatcattgattatgcaaaatcaaaaaccatgaccagagtggaacactgtgttaatatgccgccggtagaaccaagcaagaagaccccaatgacctctgcagtagacttaaacaccaaacccaatccacagcaggcaacacagttgaccacagaggattcaacatctccagcagcaaccctagagggccatctacacacagggacaactccaacaccagatgcaacagtctctcagcaaaccacagacgagcacacaacactgctgagatcaaccaacagacagaccacccaaacaaccgcagagaaaaagccaaccagagcaacaaccaaaaaagaaaccataactcgaaccacaagcacagctgcaacccaaacactcaacaccaccaaccaaaccagcaatggaagagaggcaaccacaacatctgccagatccagaaacaatgccacaactcaaagcagcgaccaaacaacccaggcagcagacccaagctcccaatcacaacatacaaagaaaagcacaacaacaacatacaacacagacacatcttctccaagtagttaacaaaaaaactataaaataaccatgaaaaccaaaaaaactagaaaagttaatttgaactcagaaaagaacacaaacactatatgaattgtttgagcgtatatactaatgaaatagcatctgtttgtgcatcaataataccatcattatttaagaattaagaagaagctaaaattcaa

SEQ ID NO: 132 - DNA, 886 bp, Human metapneumo virus
atggaagtaagagtggagaacattcgggcaatagacatgttcaaagcaaagatgaaaaaccgtataagaagtagcaagtgctatagaaatgctacactgatccttattggattaacagcactaagtatggcacttaatatttttttaatcattgattatgcaacattaaaaaacatgaccaaagtggaacactgtgttaatatgccgccggtagaaccaagcaagaagaccccaatgacctctgcagtagacttaaacaccaaacccaatccacagcaggcaacacagttgaccacagaggactctacatctttagcagcaaccctagaggaccatccacacacagggacaactccaacaccagatgcaacagtctctcagcaaaccacagacgagcacacaacactgctgagatcaaccaacagacagaccacccaaacaactgcagagaaaaagccaaccagagcaacaaccaaaaaagaaaccacaactcgaaccacaagcacagctgcaacccaaacactcaacaccaccaaccaaactagcaatggaagagaggcaaccacaacatctgccagatccagaaacaatgccacaactcaaagcagcgatcaaacaacccaagcagcagaaccaaactcccaatcacaacatacacagaaaagcacaacaacaacatacaacacagacacatcttctctaagtagttaacaaaaaaactataaaataaccatgaaaaccaaaaaactagaaaagttaatttgaactcagaaaggaacacaaacactatatgaattatttgagcgtatatactaatgaaatagcatctgtttgtgcatcaataataccatcattatttaagaaataagaagaagctaaaattcaa

SEQ ID NO: 133 - protein, 236 aa, Human metapneumo virus; identical to SEQ ID NO: 26

SEQ ID NO: 134 - protein, 236 aa, Human metapneumo virus
MEVKVENIRTIDMLKASVKNRVARSKCFKNASLVLIGITTLSIALNIYLIINYKMQKNTSESEHHTSSSPMESSRETPTVPTDNSDTNSSPQHPTQQSTEGSTLYFAASASSPETEPTSTPDTTNRPPFVDTHTTPPSASRTKTSPAVHTKNNPRTSSRTHSPPRATTRTARRTTTLRTSSTRKRPSTASVQPDISATTHKNEEASPASPQTSASTTRIQRKSVEANTSTTYNQTS

SEQ ID NO: 135 - protein, 236 aa, Human metapneumo virus
MEVKVENIRTIDMLKARVKNRVARSKCFKNASLVLIGITTLSIALNIYLIINYKMQKNTSESEHHTSSSPMESSRETPTVPTDNSDTNSSPQHPTQQSTEGSTLYFAASANSPETEPTSTPDTTNRPPFVDTHTTPPSASRTKTSPAVHTKNNPRISSRTHSPPWATTRTARRTTTLRTSSTRKRPSTASAQPDISATTHKNEEASPASPQTSASTTRTQRKSVEANTSTTYNQTS

SEQ ID NO: 136 - protein, 236 aa, Human metapneumo virus
MEVKVENIRTIDMLKARVKNRVARSKCFKNASLVLIGITTLSIALNIYLIINYKMQKNTSESEHHTSSSPMESSRETPTVPTDNSDTNSSPQHPTQQSTEGSTLYFAASANSPETEPTSTPDTTDRPPFVDTHTTPPSASRTKTSPAVHTKNNPRISSRTHSPPWATTRTARRTTTLRTSSTRKRPSTASVQPDISATTHKNEEASPASPQTSASTTRTQRKSVEANTSTTYNQTS

SEQ ID NO: 137 - protein, 236 aa, Human metapneumo virus
MEVKVENIRTIDMLKARVKNRVARSKCFKNASLVLIGITTLSIALNIYLIINYKMQKNTSESEHHTSSSPMESSRETPTVPTDNSDTNSSPQHPTQQSTEGSTLYFAASASSPETEPTSTPDTTDRPPFVDTHTTPPSASRTKTSPAVHTKNNPRISSRTHSPPWATTRTARRTTTLRTSSTRKRPSTASVQPDISATTHKNEEASPASPQTSASTTRTQRKSVEANTSTTYNQTS

SEQ ID NO: 138 - protein, 236 aa, Human metapneumo virus
MEVKVENIRTIDMLKARVKNRVARSKCFKNASLILIGITTLSIALNIYLIINYTMQENTSESEHHTSSSPMESSRETPTVPIDNSDTNPGSQYPTQQSTEDSTLHSAASASSPETEPTSTPDTTSRPPFVDTHTTPPSASRTRTSPAVHTKNNPRVSPRTHSPPWAMTRTVRGTTTLRTSSTRKRLSTASVQPDSSATTHKHEETSPVSPQTSASTARPQRKGMEASTSTTYNQTS

SEQ ID NO: 139 - protein, 236 aa, Human metapneumo virus
MEVKVENIRTIDMLKARVKNRVARSKCFKNASLILIGITTLSIALNIYLIINYTMQENTSESEHHTSSSPMESSRETPTVPMDNSDTNPGSQYPTQQSTEGSTLHFAASASSPETEPTSTPDTTSRPPFVDTHTTPSSASRTKTSPAVHTKNNLRISPRTHSPPWAMTRTVRGTTTLRTSSIRKRPSTASVQPDSSATTHKHEEASPVSPQASASTARPQRKGMEASTSTTYNQTS

SEQ ID NO: 140 - protein, 236 aa, Human metapneumo virus
MEVKVENIRTIDMLKARVKNRVARSKCFKNASLILIGITTLSIALNIYLIINYTMQENTSESEHHTSSSPMESSRETPTVPMDNSDTNPGSQYPTQQSTEGSTLHFAASASSPETEPTSTPDTTSRPPFVDTHTTPSSASRIRTSPAVHTKNNLRISPRTHSPPWAMTRTVRGTTTLRTSSIRKRPSTASVQPDSSATTHKHEEASPVSPQASASTARPQRKGMEASTSTTYNQTS

SEQ ID NO: 141 - protein, 228 aa, Human metapneumovirus
  VARIANT 220: Xaa = unknown amino acid or other
MEVKVENIRAIDMLKARVKNRVARSKCFKNASLILIGITTLSIALNIYLIINYTIQKTTSESEHHTSSPPTEPNKEASTISTDNPDINPSSQHPTQQSTENPTLNPAASASPSETEPASTPDTTNRLSSVDRSTAQPSESRTKTKPTVHTINNPNTASSTQSPPRTTTKAIRRATTFRMSSTGKRPTTTLVQSDSSTTTQNHEETGSANPQASASTMQNXHTNNIKPN

SEQ ID NO: 142 - protein, 228 aa, Human metapneumo virus
MEVKVENIRAIDMLKARVKNRVARSKCFKNASLILIGITTLSIALNIYLIINYTIQKTTSESEHHTSSPPTESNKETSTIPIDNPDINPNSQHPTQQSTESPTLNPAASVSPSETEPASTPDTTNRLSSVDRSTTQPSESRTKTKPTVHTKNNPSTVSRTQSPLRATTKAVLRATAFRTSSTRKRPTTTSVQSDSSTTTQNHEETSSANPQASASTMQSQHTNNIKPN

SEQ ID NO: 143 - protein, 228 aa, Human metapneumo virus
MEVKVENIRAVDMLKARVKNRVARSKCFKNASLILVGITTLSIALNIYLIVNYTIQKTTSESEHHTSSSPTESNKGTSTIPTDNPDINPNSQHPTQQSTESPTLNTAASVSPSETEPASTPDTTNRLSSADRSTTQPSESRTKTKLTVHTKNNLSTASRTQSPPRATTKAVLRDTAFHTSSTGKRPTTTSVQSGSSTTTQNHEETSSSNPQASASTMQDQDTNNTKQN

SEQ ID NO: 144 - protein, 228 aa, Human metapneumo virus
  VARIANT 81: Xaa = Any Amino Acid
MEVKVENIRAVDMLKARVKNRVARSKCFKNASLILVGITTLSIALNIYLIVNYTIQKTTSESEHHTSSSPTESNKGTSTIXTDNPDINPNSQHPTQQSTESPTLNTAASVSPSETEPASTPDTTNRLSSADRSTTQPSESRTKTKLTVHTKNNLSTASRTQSPPRATTKAVLRDTAFHTSSTGKRPTTTSVQSGSSTTTQNHEETSSSNPQASASTMQDQDTNNTKQN

SEQ ID NO: 145 - protein, 228 aa, Human metapneumovirus
  VARIANT 220: Xaa = unknown amino acid or other
MEVKVENIRAIDMLKARMKNRVARSKCFKNASLILIGITTLSIALNIYLIINYTIQKTTSESEHHTSSPPTESNKETSTIPIDNPDINPNSQHPTQQSTESLTLNPAASVSPSETEPASTPDTTNRLSSVDRSTTQPSESRTKTKLTVHKKNIPSTVSRTQSSIRATTKAVLRATAFRTSSTGERPTTTSVQSDSSTTTQNHEETGSANPQASASTMQNXHTNIVKPN

SEQ ID NO: 146 - protein, 228 aa, Human metapneumovirus
  VARIANT 220: Xaa = unknown amino acid or other
MEVKVENIRAIDMLKARVKNRVARSKCFKNASLILIGITTLSIALNIYLIINYTIQKTTSESEHHTSSPPTESNKETSTISIDNPDINPNSQHPTQQSTESLTLSPTASVSPSETEPASTSDTTSRLSSVDRSTTQPSESRARTKPTVHKKNIPSTVSRTQSPLRATTKAVLRATAFRTSSTGEGPTTTSVQSDSSTTTQNHEETGSANPQASASTMQNXHTNIVKPN

SEQ ID NO: 147 - protein, 228 aa, Human metapneumovirus
  VARIANT 220: Xaa = unknown amino acid or other
MEVKVENIRAIDMLKARVKNRVARSKCFKNASLILIGITTLSIALNIYLIINYTIQKTTSESEHHTSSPPTESNKEASTISTDNPDINPNSQHPTQQSTENPTLNPAASVSSSETEPASTPDTTNRLSSVDRSTAQPSESRTKTKPTVHTRNNPSTASSTQSPPRVTTKAILRATVFRMSSTGKRPATTLVQSDSSTTTQNHEETGSANSQASASTMQNXHSNNIKPN

SEQ ID NO: 148 - protein, 228 aa, Human metapneumo virus
MEVKVENIRAIDMLKARVKNRVARSKCFKNASLILIGITTLSIALNIYLIINYTIQKTTSESEHHTSSPPTESNKETSTISIDNSDINPNSQHPTQQSTESLTLSPTASVSPSETEPASTSDTTNRLSSVDRSTTQPSESRARTKPTVHKKNIPSTVSRTQSPLRATTKAVLRATAFRMSSTGEGPTTTSVQSDSSTTTQNHEETGSANPQASASTMQNQHTNIAKPN

SEQ ID NO: 149 - protein, 228 aa, Human metapneumo virus
MEVKVENIRAIDMLKARVKNRVARSKCFKNASLILIGITTLSIALNIYLIINYTIQKTTSESEHHTSSPPTESNKETSTIPIDNPDINPNSQHPTQQSTESLTLYPTSSVSSSETEPASTPGITNHLSFVDRSTTQPSESRTKTNRTVHKKNISSTVSRTQSPPRTTAKAVPRATALRTSSTGERPTTTPVQPDSSTTTQNHEETGSANPQASASTMQNQHTNIARPN

SEQ ID NO: 150 - protein, 228 aa, Human metapneumo virus
MEVKVENIRAIDMLKARVKNRVARSKCFKNASLILIGITTLSIALNIYLIINYTIQKTTSESEHHTSSPPTESNKETSTIPIDNPDINPNSQHPTQQSAESLTLYPTSSVSSSETEPASTPGITNHLSFVDRSTTQPSESRTKTNRTVHKKNISSTVSRTQSPPRTTAKAVPRATALRTSSTGERPTTTPVQPDSSTTTQNHEETGSANPQASASTMQNQHTNIARPN

SEQ ID NO: 151 - protein, 228 aa, Human metapneumo virus; identical to SEQ ID NO: 149

SEQ ID NO: 152 - protein, 228 aa, Human metapneumo virus
MEVKVENIRAIDMLKARVKNRVARSKCFKNASLILIGITTLSIALNIYLIINYTIQQTTSESEHHTSSPPTESNKEASTISTDNPDINPNSQHPTQQSTENPTLNPAASASPSETESASTPDTTNRLSSVDRSTVQPSENRTKTKLTVHTRNNLSTASSTQSPPRATTKAIRRATTLRMSSTGRRPTTTLVQSDSSTTTQNHEETGSANPQASASTMQNQHTNNIKPN

SEQ ID NO: 153 - protein, 228 aa, Human metapneumo virus
MEVKVENIRAIDMLKARVKNRVARSKCFKNASLILIGITTLSIALNIYLIINYTIQKTTSESEHHTSSPPTESNKEASTISTDNPDINPNSQHPTQQSTENPTLNPAASASPSETESASTPDTTNRLSSVDRSTVQPSENRTKTKLTVHTRNNLSTASSTQSPPRATTKAIRRATTLRMSSTGRRPTTTLVQSDSSTTTQNHEETGSANPQASASTMQNQHTNNIKPN

SEQ ID NO: 154 - protein, 231 aa, Human metapneumovirus
  VARIANT 225: Xaa = unknown amino acid or other
MEVRVENIRAIDMFKAKIKNRIRSSRCYRNATLILIGLTALSMALNIFLIIDHATLRNMIKTENCANMPSAEPSKKTPMTSTAGPNTKPNPQQATQWTTENSTSPVATPEGHPYTGTTQTSDTTAPQQTTDKHTAPLKSTNEQITQTTTEKKTIRATTQKREKGKENTNQTTSTAATQTTNTTNQIRNASETITTSDRPRTDTTTQSSEQTTRATDPSSPPHHAXRGAKLK

SEQ ID NO: 155 - protein, 231 aa, Human metapneumo virus
MEVRVENIRAIDMFKAKIKNRIRSSRCYRNATLILIGLTALSMALNIFLIIDHATLRNMIKTENCANMPSAEPSKKTPMTSTAGPSTEPNPQQATQWTTENSTSPAATLESHPYTGTTQTPDITAPQQTTDKHTALPKSTNEQITQTTTEKKTTRATTQKREKEKENTNQTTSTAATQTTNTTNQTRNASETITTSDRPRIDTTTQSSDQTTRATDPSSPPHHAQSGAKPK

SEQ ID NO: 156 - protein, 231 aa, Human metapneumo virus
MEVRVENIRAIDMFKAKIKNRIRSSRCYRNATLILIGLTALSMALNIFLIIDHATLRNMIKTENCANMPPAEPSKKTPMTSTAGPNTKPNPQQATQWTTENSTFPAATSEGHLHTGTTQTPDTTAPQQTTDKHTALPKSTNEQITQTTTEKKTTRATTQRREKGKENTNQTTSTAATQTTNTTNQIRNASETITTSDRPRTDSTTQSSEQTTRATDPSSPPHHAQGSAKPK

SEQ ID NO: 157 - protein, 231 aa, Human metapneumo virus
MEVRVENIRAIDMFKAKIKNRIRSSRCYRNATLILIGLTALSMALNIFLIIDHATLRNMIKTENCANMPPAEPSRKTPMTSTAGPNTKPNPQQATQWTTENSTSPAATPEGHLHTGTTQTPDTTAPQQTTDKHTALPKSTNEQITQATTEKKTTRETTQRREKGKENTNQTTSTAATQTTNTTNQIRNASETITTSDRPRTDSTTQSSEQTTQATDPSSPAHHAQGSAKPK

SEQ ID NO: 158 - protein, 231 aa, Human metapneumo virus
MEVRVENIRAIDMFKAKIKNRIRSSRCYRNATLILIGLTALSMALNIFLIIDHATLRNMIKTENCANMPPAEPSKKTPMTSTAGLNTKPNPQQATQWTTENSTSPAATPEGHLHTGTTQTPDTTAPQQTTDKHTALPKSTNEQITQTTTEKKTTRATTQRREKGKENTNQTTSTAATQTTNTTNQIRNASETITTSDRPRTDSTTQSSEQTTRATDPSSPPHHAQGSAKPK

SEQ ID NO: 159 - protein, 231 aa, Human metapneumo virus
MEVRVENIRAIDMFKAKIKNRIRSSRCYRNATLILIGLTALSMALNIFLIIDHATLRNMIKTENCANMPPAEPSKKTPMTSTAGPNTKPNPQQATQWTTENSTSPAATPEGHLHTGTTQTPDTTAPQQTTDKHTALPKSTNEQITQTTTEKKTTRATTQRREKGKENTNQTTSTAATQTTNTTNQIRNAIETITTSDRPRTDSTTQSSEQTTRATDPSSHPHHAQGSAKPK

SEQ ID NO: 160 - protein, 236 aa, Human metapneumo virus; identical to SEQ ID NO: 29

SEQ ID NO: 161 - protein, 236 aa, Human metapneumovirus
  VARIANT 220, 227: Xaa = unknown amino acid or other
MEVRVENIRTIDMFKAKMKNRIRSSKCYRNATLILIGLTALSMALNIFLIIDYATFKNMTKVEHCANMPPVEPSKKTPMTSTVDSSTGPNPQQTTQWTTEDSTSLAATSEDHLHTGTTPTLDATVSQQTPDKHTTPLRSTNGQTTQTTTEKKPTRAIAKKETTNQTTSTAATQTFNTTNQTRNGRETTITSARSRNDATTQSSEQTNQTTDPSSQPHHAXISTITIXTQHRHIFSK

SEQ ID NO: 162 - protein, 236 aa, Human metapneumovirus
  VARIANT 208: Xaa = unknown amino acid or other
MEVRVENIRAIDMFKAKMKNRIRSSKCYRNATLILIGLTALSMALNIFLIIDYAMLKNMTKVEHCVNMPPVEPSKKTPMTSAVDLNTKLNPQQATQLTTEDSTSLAATSEDHLLTGTTPTPDATVSQQTTDEHTTLLRSTNRQTTQTTTEKKPTGATTKKETTTRTTSTAATQTLNTTNQTSNGREATTTSTRSRNGATTQNSDQTTXTADPSSQPHHTQKSTTTTYNTDTSSPSS

SEQ ID NO: 163 - protein, 236 aa, Human metapneumo virus
MEVRVENIRAIDMFKAKMKNRIRSSKCYRNATLILIGLTALSMALNIFLIIDYATLKNMTKVEHCVNMPPVEPSKKTPMTSAVDLNTKLNPQQATQLTTEDSTSLAATSEGHPHTGTTPTPDATVSQQTTDEHTTLLRSTNRQTTQTATEKKPTGATTKKETTTRTTSTAATQTPNTTNQTSNGREATTTSARSRNGATTQNSDQITQAADSSSQPHHTQKSTTTAYNTDTSFPSS

SEQ ID NO: 164 - protein, 236 aa, Human metapneumo virus
MEVRVENIRAIDMFKAKMKNRIRSSKCYRNATLILIGLTALSMALNIFLIIDYATLKNMTKVEHCVNMPPVEPSKKTPMTSAVDSNTKPNPQQATQLTTEDSTSLAATLEDHPHTGTTPTPDATVSQQTTDEHTTLLRSTNRQTTQTTAEKKPTRATTKKETTTRTTSTAATQTLNTTNQTSNGREATTTSARSRNNATTQSSDQTTQAAEPSSQSQHTQKSTTTTYNTDTSSLSS

SEQ ID NO: 165 - protein, 236 aa, Human metapneumo virus
MEVRVENIRAIDMFKAKMKNRIRSSKCYRNATLILIGLSALSMALNIFLIIDYAKSKNMTRVEHCVNMPPVEPSKKTPMTSAVDLNTKPNPQRATQLTTEDSTSLAATLEGHLHTGTTPTPDVTVSQQTTDEHTTLLRSTNRQTTQTAAEKKPTRVTTNKETITRTTSTAATQTLNTTNQTNNGREATTTSARSRNNATTQSSDQTTQAADPSSQSQHTQKSITTTYNTDTSSPSS

SEQ ID NO: 166 - protein, 236 aa, Human metapneumo virus
MEVRVENIRAIDMFKAKMKNRIRSSKCYRNATLILIGLSALSMALNIFLIIDYAKSKTMTRVEHCVNMPPVEPSKKTPMTSAVDLNTKPNPQQATQLTTEDSTSPAATLEGHLHTGTTPTPDATVSQQTTDEHTTLLRSTNRQTTQTTAEKKPTRATTKKETITRTTSTAATQTLNTTNQTSNGREATTTSARSRNNATTQSSDQTTQAADPSSQSQHTKKSTTTTYNTDTSSPSS

SEQ ID NO: 167 - protein, 236 aa, Human metapneumo virus
MEVRVENIRAIDMFKAKMKNRIRSSKCYRNATLILIGLTALSMALNIFLIIDYATLKNMTKVEHCVNMPPVEPSKKTPMTSAVDLNTKPNPQQATQLTTEDSTSLAATLEDHPHTGTTPTPDATVSQQTTDEHTTLLRSTNRQTTQTTAEKKPTRATTKKETTTRTTSTAATQTLNTTNQTSNGREATTTSARSRNNATTQSSDQTTQAAEPNSQSQHTQKSTTTTYNTDTSSLSS

SEQ ID NO: 168 - DNA, 449 bp, Human metapneumo virus
ataggagtttacggaagctccgtaatttacatggtgcaactgccaatctttggggttatagacacgccttgctggatagtaaaagcagccccttcttgttcaggaaaaaagggaaactatgcttgcctcttaagagaagaccaaggatggtattgtcaaaatgcagggtcaactgtttactacccaaatgaaaaagactgtgaaacaagaggagaccatgtcttttgcgacacagcagcaggaatcaatgttgctgagcagtcaaaggagtgcaacataaacatatctactactaattacccatgcaaagttagcacaggaagacatcctatcagtatggttgcactatctcctcttggggctttggttgcttgctacaagggagtgagctgttccattggcagcaacagagtagggatcatcaagcaactgaacaaaggctgctctta

SEQ ID NO: 169 - DNA, 449 bp, Human metapneumo virus
ataggagtttacggaagctccgtaatttacatggtgcaactgccaatctttggggttatagacacgccttgctggatagtaaaagcagccccttcttgctcagaaaaaaagggaaactatgcttgcctcttaagagaagatcaaggatggtattgtcagaatgcagggtcaactgtttactacccaaatgaaaaagactgcgaaacaagaggagaccatgtcttttgcgacacagcagcaggaatcaatgttgctgagcagtcaaaggagtgcaacatcaacatatccactactaattacccatgcaaagttagcacaggaagacatcctatcagtatggttgcactgtctcctcttggggctttggttgcttgctacaagggagtgagctgttccattggcagcaacagagtagggatcatcaagcaactgaacaaaggctgctctta

SEQ ID NO: 170 - DNA, 449 bp, Human metapneumo virus
ataggagtttacggaagctccgtaatttacatggtgcaactgccaatctttggggttatagacacgccttgctggatagtaaaagcagccccttcttgctcagaaaaaaagggaaactatgcttgcctcttaagagaagatcaaggatggtattgtcagaatgcagggtcaactgtttactacccaaatgaaaaagattgcgaaacaagaggagaccatgtcttttgcgacacagcagcaggaatcaatgttgctgagcagtcaaaggagtgcaacatcaacatatccactactaattacccatgcaaagttagcacaggaagacatcctatcagtatggttgcactgtctcctcttggggctttggttgcttgctacaagggagtgagctgttccattggcagcaacagagtagggatcatcaagcaactgaacaaaggctgctctta

SEQ ID NO: 171 - DNA, 449 bp, Human metapneumo virus; identical to SEQ ID NO: 169

SEQ ID NO: 172 - DNA, 449 bp, Human metapneumo virus
ataggagtttacggaagctccgtaatttacatggtgcaactgccaatctttggggttatagacacgccttgctggatagtaaaagcagccccttcttgctcagaaaaaaagggaaactatgcttgcctcttaagagaagatcaaggatggtattgtcagaatgcagggtcaactgtttactacccaaatgaaaaagattgcgaaacaagaggagaccatgtcttttgcgacacagcagcaggaatcaatgttgctgagcagtcaaaggagtgcaacatcaacatatccactactaattacccatgcaaagttagcacaggaagacatcctatcagtatggttgcactgtctcctcttggggctttggttgcttgctacaagggagtgagctgttccattggtagcaacagagtagggatcatcaagcaactgaacaaaggctgctctta

SEQ ID NO: 173 - DNA, 449 bp, Human metapneumo virus
ataggagtttacggaagctccgtaatttacatggtgcaactgccaatctttggggttatagacacgccttgctggatagtaaaagcagccccttcttgttcagaaaaaaagggaaactatgcttgcctcttaagagaagaccaaggatggtattgtcagaatgcagggtcaactgtttactacccaaatgaaaaagactgtgaaacaagaggagaccatgtcttttgcgacacagcagcaggaatcaatgttgctgagcagtcaaaggagtgcaacataaacatatctactactaattacccatgcaaagttagcacaggaagacatcctatcagtatggttgcactgtctcctcttggggctttggttgcttgctacaagggagtgagctgttccattggcagcaacagagtagggatcatcaagcaactgaacaaaggctgctctta

SEQ ID NO: 174 - DNA, 449 bp, Human metapneumo virus; identical to SEQ ID NO: 173

SEQ ID NO: 175 - DNA, 449 bp, Human metapneumo virus; identical to SEQ ID NO: 173

SEQ ID NO: 176 - DNA, 449 bp, Human metapneumo virus
ataggagtttacggaagctccgtaatttacatggtgcaactgccaatctttggggttatagacacgccttgctggatagtaaaagcagccccttcttgctcagaaaaaaagggaaactatgcttgcctcttaagagaagatcagggatggtattgtcagaatgcagggtcaactgtttactacccaaatgaaaaagactgtgaaacaagaggagaccatgtcttttgcgacacagcagcaggaatcaatgttgctgagcagtcaaaggagtgcaacatcaacatatccactactaattacccatgcaaagttagcacaggaagacatcctatcagtatggttgcactgtctcctcttggggctttggttgcttgctacaagggagtgagctgttccattggcagcaacagagtaggaatcatcaagcaactgaacaaaggctgctctta

SEQ ID NO: 177 - DNA, 449 bp, Human metapneumo virus
ataggagtttacggaagctccgtaatttacatggtgcaactgccaatctttggagttatagacacgccttgctggatagtaaaagcagccccttcttgctcagaaaaaaagggaaactatgcttgcctcttaagagaagatcaaggatggtattgtcagaatgcagggtcaactgtttactacccaaatgaaaaagactgcgaaacaagaggagaccatgtcttttgcgacacagcagcaggaatcaatgttgctgagcagtcaaaggagtgcaacatcaacatatccactactaattacccatgcaaagttagcacaggaagacatcctatcagtatggttgcactgtctcctcttggggctttggttgcttgctacaagggagtgagctgttccattggcagcaacagagtagggatcatcaagcaactgaacaaaggctgctctta

SEQ ID NO: 178 - DNA, 449 bp, Human metapneumo virus
ataggagtttacggaagctccgtaatttacatggtgcaactgccaatctttggggttatagacacgccttgttggatagtaaaagcagccccttcttgctcagaaaaaaaggggaactatgcttgcctcttaagagaagatcaaggatggtattgtcagaatgcagggtcaactgtttactacccaaatgaaaaagactgcgaaacaagaggagaccatgtcttttgcgacacagcagcaggaatcaatgttgctgagcagtcaaaggagtgcaacatcaacatatccactactaattacccatgcaaagttagcacaggaagacatcctatcagtatggttgcactgtctcctcttggggctttggttgcttgctacaagggagtgagctgttccattggcagcaacagagtagggatcatcaagcaactgaacaaaggctgctctta

SEQ ID NO: 179 - DNA, 449 bp, Human metapneumo virus
ataggagtttacggaagctccgtaatttacatggtgcaactgccaatctttggagttatagacacgccttgctggatagtaaaagcggccccttcttgctcagaaaaaaagggaaactatgcttgcctcttaagagaagatcaaggatggtattgtcagaatgcagggtcaactgtttactacccaaatgaaaaagactgcgaaacaagaggagaccatgtcttttgcgacacagcagcaggaatcaatgttgctgagcagtcaaaggagtgcaacatcaacatatccactactaattacccatgcaaagttagcacaggaagacatcctatcagtatggttgcactgtctcctcttggggctttggttgcttgctacaagggagtgagctgttccattggcagcaacagagtagggatcatcaagcaactgaacaaaggctgctctta

SEQ ID NO: 180 - DNA, 449 bp, Human metapneumo virus
ataggagtttacggaagctccgtaatttacatggtgcaactgccaatctttggggttatagacacgccttgctggatagtaaaagcagccccttcttgctcagaaaaaaagggaaactatgcttgccttttaagagaagatcaaggatggtattgtcagaatgcagggtcaactgtttactacccaaatgaaaaagactgcgaaacaagaggagaccatgtcttttgcgacacagcagcaggaatcaatgttgctgagcagtcaaaggagtgcaacatcaatatatccactactaattacccatgcaaagttagcacaggaagacatcctatcagtatggttgcactgtctcctcttggggctttggttgcttgctacaagggagtgagctgttccattggcagcaacagagtagggatcatcaagcaactgaacaaaggctgctctta

SEQ ID NO: 181 - DNA, 449 bp, Human metapneumo virus
ataggagtttacggaagctccgtaatttacatggtgcaactgccaatctttggagttatagacacgccttgctggatagtaaaagcggccccttcttgctcggaaaaaaagggaaactatgcttgcctcttaagagaagatcaaagatggtattgtcagaatgcagggtcaactgtttactacccaaatgaaaaagactgcgaaacaagaggagaccatgtcttttgcgacacagcagcaggaatcaatgttgctgagcagtcaaaggagtgcaacatcaacatatccactactaattacccatgcaaagttagcacaggaagacatcctatcagtatggttgcactgtctcctcttggggctttggttgcttgctacaagggagtgagctgttccattggcagcaacagagtagggatcatcaagcaactgaacaaaggctgctctta

SEQ ID NO: 182 - DNA, 449 bp, Human metapneumo virus
ataggagtttatggaagctccgtaatttacatggtgcaactgccaatctttggagttatagacacgccttgctggatagtaaaagcggccccttcttgctcagaaaaaaagggaaactatgcttgcctcttaagagaagatcaaggatggtattgtcagaatgcagggtcaactgtttactacccaaatgaaaaagactgcgaaacaagaggagaccatgtcttttgcgacacagcagcaggaatcaatgttgctgagcagtcaaaggagtgcaacatcaacatatccactactaattacccatgcaaagttagcacaggaagacatcctatcagtatggttgcactgtctcctcttggggctttggttgcttgctacaagggagtgagctgttctattggcagcaacagagtagggatcatcaagcaactgaacaaaggctgctctta

SEQ ID NO: 183 - DNA, 449 bp, Human metapneumo virus
ataggagtttatggaagctccgtaatttacatggtgcaactgccaatctttggagttatagacacgccttgctggatagtaaaagcggccccttcttgctcagaaaaaaagggaaactatgcttgcctcttaagagaagatcaaggatggtattgtcagaatgcagggtcaactgtttactacccaaatgaaaaagactgcgaaacaagaggagaccatgtcttttgcgacacagcagcaggaatcaatgttgctgagcagtcaaaggagtgcaacatcaacatatccactactaattacccatgcaaagttagcacaggaagacatcctatcagtatggttgcactgtctcctcttggggctttggttgcttgctacaagggagtgagctgttccattggcagcaacagagtagggatcatcaagcaactgaacaaaggctgctctta

SEQ ID NO: 184 - DNA, 449 bp, Human metapneumo virus
ataggagtttacggaagctccgtaatttacatggtgcaactgccaatctttggagttatagacacgccttgctggatagtaaaagcggccccttcttgctcagaaaaaaagggaaactatgcttgcctcttaagagaagatcaaggatggtattgtcagaatgcagggtcaactgtttactacccaaatgaaaaagactgcgaaacaagaggagaccatgtcttttgcgacacagcagcaggaatcaatgttgctgagcagtcaaaggagtgcaacatcaacatatccaccactaattacccatgcaaagttagcacaggaagacatcctatcagtatggttgcactgtctcctcttggggctttggttgcttgctacaagggagtgagctgttccattggcagcaacagagtagggatcatcaagcaactgaacaaaggctgctctta

SEQ ID NO: 185 - DNA, 449 bp, Human metapneumo virus; identical to SEQ ID NO: 183

SEQ ID NO: 186 - DNA, 449 bp, Human metapneumo virus; identical to SEQ ID NO: 183

SEQ ID NO: 187 - DNA, 449 bp, Human metapneumo virus; identical to SEQ ID NO: 183

SEQ ID NO: 188 - DNA, 449 bp, Human metapneumo virus; identical to SEQ ID NO: 168

SEQ ID NO: 189 - DNA, 449 bp, Human metapneumo virus; identical to SEQ ID NO: 168

SEQ ID NO: 190 - DNA, 449 bp, Human metapneumo virus; identical to SEQ ID NO: 184

SEQ ID NO: 191 - DNA, 449 bp, Human metapneumo virus
ataggagtttacggaagctccgtaatttacatggtgcaactgccaatctttggggttatagacacgccttgctggatagtaaaagcagccccttcttgctcagaaaaaaagggaaactatgcttgcctcttaagagaagatcaaggatggtattgtcagaatgcagggtcaactgtttactacccaaatgaaaaagactgcgaaacaagaggagaccatgtcttttgcgacacagcagcaggaatcaatgttgctgagcagtcaaaggagtgcaacatcaacatatccactactaattacccatgcaaagttagcacaggaagacatcctatcagtatggttgcactgtctcctcttggggctctggttgcttgctacaagggagtgagctgctccattggcagcaacagagtagggatcatcaagcaactgaacaaaggctgctctta

SEQ ID NO: 192 - DNA, 449 bp, Human metapneumo virus; identical to SEQ ID NO: 184

SEQ ID NO: 193 - DNA, 449 bp, Human metapneumo virus; identical to SEQ ID NO: 184

SEQ ID NO: 194 - DNA, 449 bp, Human metapneumo virus; identical to SEQ ID NO: 168

SEQ ID NO: 195 - DNA, 449 bp, Human metapneumo virus; identical to SEQ ID NO: 183

SEQ ID NO: 196 - DNA, 449 bp, Human metapneumo virus; identical to SEQ ID NO: 168

SEQ ID NO: 197 - DNA, 449 bp, Human metapneumo virus
ataggggtctacgggagctctgtaatttacatggtgcagctgccaatctttggcgttatagacacgccttgctggatagtaaaagcagccccctcttgttccgaaaaaaagggaaactatgcttgcctcttaagagaagaccaagggtggtattgtcagaatgcagggtcaactgtttactacccaaatgagaaagactgtgaaacaagaggagaccatgtcttttgcgacacagcagcaggaattaatgttgctgagcaatcaaaggagtgcaacatcaacatatccactacaaattacccatgcaaagtcagcacaggaagacatcctatcagtatggttgcactgtcccctcttggggctctggttgcttgctacaaaggagtaagctgttccattggcagcaatagagtagggattatcaagcagctgaacaaaggttgctctta

SEQ ID NO: 198 - DNA, 449 bp, Human metapneumo virus
ataggggtctacgggagctccgtaatttacatggtgcagctgccaatctttggcgtcatagacacgccttgctggatagtaaaagcagccccctcttgttccgaaaaaaagggaaactatgcttgccttttaagagaagatcaagggtggtattgtcagaatgcagggtcaactgtttactacccaaatgagaaagactgtgaaacaagaggagaccatgtcttttgcgacacagcagcaggaattaatgttgctgagcaatcaaaagagtgcaacatcaacatatccactacaaattacccatgcaaagtcagcacaggaagacatcctatcagtatggttgcactgtcccctcttggggctctagttgcttgctacaaaggagtaagctgttccattggcagcaatagagtagggatcatcaagcagctgaacaaaggttgctccta

SEQ ID NO: 199 - DNA, 449 bp, Human metapneumo virus
ataggggtctacgggagctccgtaatttacatggtgcagctgccaatctttggcgtcatagacacgccttgctggatagtaaaagcagccccctcttgttccgaaaaaaagggaaactatgcttgccttttaagagaagatcaagggtggtattgtcagaatgcagggtcaactgtttactacccaaatgagaaagactgtgaaacaagaggagaccatgtcttttgcgacacagtagcaggaattaatgttgctgagcaatcaaaagagtgcaacatcaacatatccactacaaattacccatgcaaagtcagcacaggaagacatcctatcagtatggttgcactgtcccctcttggggctctagttgcttgctacaaaggagtaagctgttccattggcagcaatagagtagggatcatcaagcagctgaacaaaggttgctccta

SEQ ID NO: 200 - DNA, 449 bp, Human metapneumo virus; identical to SEQ ID NO: 198

SEQ ID NO: 201 - DNA, 449 bp, Human metapneumo virus
ataggggtctacgggagctccgtaatttacatggtgcagctgccaatctttggcgttatagacacgccctgctggatagtaaaagcagccccctcttgttccgaaaaaaagggaaactatgcttgccttctaagagaagaccaagggtggtattgtcagaatgcagggtcaactgtttactacccaaatgagaaggactgtgaaacaagaggagaccatgtcttttgcgacacagcagcaggaattaatgttgctgagcaatcaaaggagtgcaacatcaacatatccaccacaaattacccatgcaaagtcagcacaggaaggcatcctatcagtatggttgcactgtcccctcttggggctctggttgcttgttacaaaggagtaagctgttctattggcagcaatagagtagggatcatcaagcagctgaacaaaggttgctctta

SEQ ID NO: 202 - DNA, 449 bp, Human metapneumo virus
ataggggtctacgggagctccgtaatttacatggtgcagctgccaatctttggcgttatagacacgccttgctggatagtaaaagcagccccctcttgttccgaaaaaaagggaaactatgcttgcctcttaagagaagaccaagggtggtattgtcagaatgcagggtcaactgtttactacccaaatgagaaagactgtgaaacaagaggagaccatgtcttttgcgacacagcagcaggaattaatgttgctgagcaatcaaaggagtgcaacatcaacatatccactacaaattacccatgcaaagtcagcacaggaagacatcctatcagtatggttgcactgtctcctcttggggctctagttgcttgctacaaaggagtaagctgttccattggcagcaacagagtagggatcatcaagcagctgaacaaaggttgctccta

SEQ ID NO: 203 - DNA, 449 bp, Human metapneumo virus; identical to SEQ ID NO: 201

SEQ ID NO: 204 - DNA, 449 bp, Human metapneumo virus
ataggggtctacgggagctccgtaatttacatggtgcagctgccaatctttggcgttatagacacgccttgctggatagtaaaagcagccccttcttgttccgaaaaaaagggaaactatgcttgcctcttaagagaagaccaagggtggtattgtcagaatgcagggtcaactgtttactacccaaatgagaaagactgtgaaacaagaggagaccatgtcttttgcgacacagcagcaggaattaatgttgctgagcaatcaaaggagtgcaacatcaacatatccactacaaattacccatgcaaagtcagcacaggaagacatcctatcagtatggttgcactgtctcctcttggggctctggttgcttgctacaaaggagtaagctgttccattggcagcaacagagtagggatcatcaagcagctgaacaaaggttgctccta

SEQ ID NO: 205 - DNA, 449 bp, Human metapneumo virus; identical to SEQ ID NO: 204

SEQ ID NO: 206 - DNA, 449 bp, Human metapneumo virus
ataggggtctacgggagctccgtaatttacatggtgcagctgccaatctttggcgttatagacacgccttgctggatagtaaaagcagccccttcttgttccgaaaaaaagggaaactatgcttgcctcttaagagaagaccaaggatggtattgtcagaatgcagggtcaactgtttactacccaaatgagaaagactgtgaaacaagaggagaccatgtcttttgcgacacagcagcaggaattaatgttgctgagcaatcaaaggagtgcaacatcaacatatccaccacaaattacccatgcaaagtcagcacaggaaggcatcctatcagtatggttgcactgtcccctctcggggctctggttgcctgttacaaaggagtaagttgttccattggcagcaatagagtagggatcatcaagcagctgaacaaaggttgctctta

SEQ ID NO: 207 - DNA, 449 bp, Human metapneumo virus
ataggggtctacgggagctccgtaatttacatggtgcagctgccaatctttggcgttatagacacgccttgctggatagtaaaagcagccccttcttgttccgaaaaaaagggaaactatgcttgcctcttaagagaagaccaagggtggtattgtcagaatgcagggtcaactgtttactacccaaatgagaaagactgtgaaacaagaggagaccatgtcttttgcgacacagcagcaggaattaatgttgctgagcaatcaaaggagtgcaacatcaacatatccactacaaattacccatgcaaagtcagcacaggaagacatcctatcagtatggttgcactgtctcctcttggggctctggttgcttgctacaaaggagtaagctgttccattggcagcaacagagtagggatcataaagcagctgaacaaaggttgctccta

SEQ ID NO: 208 - DNA, 449 bp, Human metapneumo virus; identical to SEQ ID NO: 206

SEQ ID NO: 209 - DNA, 449 bp, Human metapneumo virus
ataggggtctacgggagctccgtaatttacatggtgcagctgccaatctttggcgttatagacacaccttgctggatagtaaaagcagccccttcttgttccgaaaaaaagggaaattatgcttgcctcttaagagaagaccaagggtggtattgtcagaatgcagggtcaactgtttactacccaaatgagaaagactgtgaaacaagaggagaccatgtcttttgcgacacagcagcaggaattaatgttgctgagcaatcaaaggaatgcaacatcaacatatccactacaaattacccatgcaaagtcagcacaggaagacatcctatcagtatggttgcactgtctcctcttggggctctggttgcttgctacaaaggagtaagctgttccattggcagcaacagagtagggatcatcaagcagctgaacaaaggttgctccta

SEQ ID NO: 210 - DNA, 449 bp, Human metapneumo virus; identical to SEQ ID NO: 206

SEQ ID NO: 211 - DNA, 449 bp, Human metapneumo virus; identical to SEQ ID NO: 207

SEQ ID NO: 212 - DNA, 449 bp, Human metapneumo virus
ataggggtctacggaagctccgtgatttacatggttcaattgccgatctttggtgtcatagatacaccttgttggataatcaaggcagctccctcttgctcagaaaaaaacgggaattatgcttgcctcctaagagaggatcaagggtggtattgtaaaaatgcaggatccactgtttactacccaaatgaaaaagactgcgaaacaagaggtgatcatgttttttgtgacacagcagcagggatcaatgttgctgagcaatcaagagaatgcaacatcaacatatctactaccaactacccatgcaaagtcagcacaggaagacaccctataagcatggttgcactatcacctctcggtgctttggtggcttgctataaaggggtaagctgctcgattggcagcaatcgggttggaatcatcaaacaattacctaaaggctgctcata

SEQ ID NO: 213 - DNA, 449 bp, Human metapneumo virus
ataggggtctacggaagctctgtgatttacatggttcaattgccgatctttggtgtcatagatacaccttgttggatcatcaaggcagctccctcttgctcagaaaaaaacgggaattatgcttgcctcctaagagaggatcaagggtggtattgtaaaaatgcaggatctactgtttactacccaaatgaaaaagactgcgaaacaagaggtgatcatgttttttgtgacacagcagcagggatcaatgttgctgagcaatcaagagaatgcaacatcaacatatctactaccaactacccatgcaaagtcagcacaggaagacaccctataagcatggttgcactatcacctctcggtgctttggtggcttgctataaaggggtaagctgctcgattggcagcaattgggttggaatcatcaaacaattacccaaaggctgctcata

SEQ ID NO: 214 - DNA, 449 bp, Human metapneumo virus
ataggggtctacggaagctctgtgatttacatggttcaattgccgatctttggtgtcatagatacaccttgttggatcatcaaggcagctccctcttgctcagaaaaaaacgggaattatgcttgcctcctaagagaggatcaagggtggtattgtaaaaatgcaggatctactgtttactacccaaatgaaaaagactgcgaaacaagaggtgatcatgttttttgtgacacagcagcagggatcaatgttgctgagcaatcaagagaatgcaacatcaacatatctactaccaactacccatgcaaagtcagcacaggaagacaccctataagcatggttgcactatcacctctcggtgctttggtggcttgctataaaggggtaagctgctcgattggcagcaatcgggttggaatcatcaaacaattacccaaaggctgctcata

SEQ ID NO: 215 - DNA, 449 bp, Human metapneumo virus; identical to SEQ ID NO: 214

SEQ ID NO: 216 - DNA, 449 bp, Human metapneumo virus
ataggggtctacggaagctctgtgatttacatggttcaattgccgatctttggtgtcatagatacaccttgttggataatcaaggcagctccctcttgctcagaaaaaaacgggaattatgcttgcctcctaagagaggatcaagggtggtattgcaaaaatgcaggatccactgtttactacccaaatgaaaaagactgcgaaacaagaggtgatcatgttttttgtgacacagcagcagggatcaatgttgctgagcaatcaagagaatgcaacatcaacatatctactaccaactacccatgcaaagtcagcacaggaagacaccctataagcatggttgcactatcacctctcggtgctttggtggcttgctataaaggggtaagctgctcgattggcagcaatcgggttggaatcatcaaacaattacctaaaggctgctcata

SEQ ID NO: 217 - DNA, 449 bp, Human metapneumo virus; identical to SEQ ID NO: 212

SEQ ID NO: 218 - DNA, 449 bp, Human metapneumo virus
ataggggtctacggaagctctgtaatttacatggttcaattgccgatctttggtgtcatagatacaccttgttggataatcaaggcagctccctcttgctcagaaaaaaacgggaattatgcttgcctcctaagagaggatcaagggtggtattgtaaaaatgcaggatccactgtttactacccaaatgaaaaagactgcgaaacaagaggtgatcatgttttttgtgacacagcagcagggatcaatgttgctgagcaatcaagagaatgcaacatcaacatatctactaccaactacccatgcaaagtcagcacaggaagacaccctataagcatggttgcactatcacctctcggtgctttggtggcttgctataaaggggtaagctgctcgattggcagcaatcgggttggaatcatcaaacaattacctaaaggctgctcata

SEQ ID NO: 219 - DNA, 449 bp, Human metapneumo virus
ataggggtctacggaagctccgtgatttacatggttcaattgccgatctttggtgtcatagatacaccttgttggataatcaaggcagctccctcttgctcagaaaaaaacgggaattatgcttgcctcctaagagaggatcaagggtggtattgtaaaaatgcaggatccactgtttactacccaaatgaaaaagactgcgaaacaagaggtgatcatgttttttgtgacacagcagcagggatcaatgttgctgagcaatcaagagaatgcaacatcaacatatctactaccaactacccatgcaaagtcagcacaggaagacactctataagcatggttgcactatcacctctcggtgctttggtggcttgctataaaggggtaagctgctcgattggcagcaatcgggttggaatcatcaaacaattacctaaaggctgctcata

SEQ ID NO: 220 - DNA, 449 bp, Human metapneumo virus; identical to SEQ ID NO: 212

SEQ ID NO: 221 - DNA, 449 bp, Human metapneumo virus
ataggggtctacggaagctctgtgatttacatggttcaattgccgatctttggtgtcatagatacaccttgttggataatcaaggcagctccctcttgctcagaaaaaaacgggaattatgcttgcctcctaagagaggatcaagggtggtattgtaaaaatgcaggatccactgtttactacccaaatgaaaaagactgtgaaacaagaggtgatcatgttttttgtgacacagcagcagggatcaatgttgctgagcaatcaagagaatgcaacatcaacatatctactaccaactacccatgcaaagtcagcacaggaagacaccctataagcatggttgcactatcacctctcggtgctttggtggcttgctataaaggggtaagctgctcgattggcagcaatcgggttggaatcatcaaacaattacctaaaggctgctcata

SEQ ID NO: 222 - DNA, 449 bp, Human metapneumo virus
ataggggtctacggaagctccgtgatttacatggttcaattgccgatctttggtgtcatagatacaccttgttggataatcaaggcagctccctcttgctcagaaaaaaacgggaattatgcttgcctcctaagagaggatcaagggtggtactgtaaaaatgcaggatccactgtttactacccaaatgaaaaagactgcgaaacaagaggtgatcatgttttttgtgacacagcagcagggatcaatgttgctgagcaatcaagagaatgcaacatcaacatatctactaccaactacccatgcaaagtcagcacaggaagacaccctataagcatggttgcactatcacctctcggtgctttggtggcttgctataaaggggtaagctgctcgattggcagcaatcgggttggaatcatcaaacaattacctaaaggctgctcata

SEQ ID NO: 223 - DNA, 449 bp, Human metapneumo virus
ataggggtctacggaagctctgtgatttacatggttcaattgccgatctttggggtcatagatacaccttgttggataatcaaggcagctccctcttgctcagaaaaaaacgggaattatgcttgcctcctaagagaggatcaagggtggtattgtaaaaatgcaggatccactgtttactacccaaatgaaaaagactgcgaaacaagaggtgatcatgttttttgtgatacagcagcagggatcaatgttgctgagcaatcaagagaatgcaacatcaacatatctactaccaactacccatgcaaagtcagcacaggaagacaccctataagcatggttgcactatcacctctcggtgctttggtggcttgctataaaggggtaagctgctcgattggcagcaatcgggttggaatcatcaaacaattacccaaaggctgctcata

SEQ ID NO: 224 - DNA, 449 bp, Human metapneumo virus
ataggggtctacggaagctctgtgatttacatggttcaattgccgatctttggtgtcatagatacaccttgttggataatcaaggcagccccctcttgctcagagaaaaacgggaattatgcttgcctcctaagagaggatcaagggtggtattgtaaaaatgcaggatccactgtttactacccaaatgaaaaagactgcgaaacaagaggtgatcatgtgttttgtgacacagcagcagggatcaatgttgctgagcaatcaagagaatgcaacatcaacatatctactaccaactacccatgcaaagtcagcacaggaagacaccctataagcatggttgcactatcacctctcggtgctttggtggcttgctataaaggggtaagctgctcgattggcagcaatcgggttggaattatcaaacaattacctaaaggctgctcata

SEQ ID NO: 225 - DNA, 449 bp, Human metapneumo virus
ataggggtctacggaagctctgtgatttacatggttcaattgccgatctttggtgtcatagatacaccttgttggataatcaaggcagctccctcttgctcagagaaaaacgggaattatgcttgcctcctaagagaggatcaagggtggtattgtaaaaatgcaggatccactgtttactacccaaatgaaaaagactgcgaaacaagaggtgatcatgtgttttgtgacacagcagcagggatcaatgttgctgagcaatcaagagaatgcaacatcaacatatctactaccaactacccatgcaaagtcagcacaggaagacaccctataagcatggttgcactatcacctctcggtgctttggtggcttgctataaaggggtaagctgctcgattggcagcaatcgggttggaatcatcaaacaattacctaaaggctgctcata

SEQ ID NO: 226 - DNA, 449 bp, Human metapneumo virus; identical to SEQ ID NO: 221

SEQ ID NO: 227 - DNA, 449 bp, Human metapneumo virus; identical to SEQ ID NO: 212

SEQ ID NO: 228 - DNA, 449 bp, Human metapneumo virus; identical to SEQ ID NO: 225

SEQ ID NO: 229 - DNA, 449 bp, Human metapneumo virus
ataggggtctacggaagctctgtgatttacatggttcaattgccgatctttggtgtcatagatacaccttgttggataatcaaggcagctccctcttgctcagaaaaaaacgggaattatgcttgcctcctaagagaggatcaagggtggtattgtaaaaatgcaggatccactgtttactacccaaatgaaaaagactgcgaaacaagaggtgatcatgttttttgtgatacagcagcagggatcaatgttgctgagcaatcaagagaatgcaacatcaacatatctactaccaactacccatgcaaagtcagcacaggaagacaccctataagcatggttgcactatcacctctcggtgctttggtggcttgctataaaggggtaagctgctcgattggcagcaatcgggttggaatcatcaaacaattacccaaaggctgctcata

SEQ ID NO: 230 - DNA, 449 bp, Human metapneumo virus; identical to SEQ ID NO: 222

SEQ ID NO: 231 - DNA, 449 bp, Human metapneumo virus
ataggggtctacggaagctctgtgatttacatggtccagctgccgatctttggtgtcatagatacaccttgttggataatcaaggcagctccctcttgttcagaaaaagatggaaattatgcttgcctcctaagagaggatcaagggtggtattgcaaaaatgcaggatccactgtttactacccaaatgaaaaagactgcgaaacaagaggtgatcatgttttttgtgacacagcagcagggatcaatgttgctgagcaatcaagagaatgcaacatcaacatatctaccaccaactacccatgcaaagtcagcacaggaagacaccctatcagcatggttgcactatcacctctcggtgctttggtagcttgctacaagggggttagctgctcgattggcagtaatcgggttggaataatcaaacaactacctaaaggctgctcata

SEQ ID NO: 232 - DNA, 449 bp, Human metapneumo virus
ataggggtctacggaagctctgtgatttacatggtccagctgccgatctttggtgtcatagatacaccttgttggataatcaaggcagctccctcttgttcagaaaaagatggaaattatgcttgcctcctaagagaggatcaagggtggtattgtaaaaatgcaggatccactgtttactacccaaatgaaaaagactgcgaaacaagaggtgatcatgttttttgtgacacagcagcagggatcaatgttgctgagcaatcaagagaatgcaacatcaacatatctaccaccaactacccatgcaaagtcagcacaggaagacaccccatcagcatggttgcactatcacctctcggtgctttggtagcttgctacaaaggggttagctgctcgattggcagtaatcgggttggaataatcaaacaactacctaaaggctgctcata

SEQ ID NO: 233 - DNA, 449 bp, Human metapneumo virus
ataggggtctacggaagctctgtgatttacatggtccagctgccgatctttggtgtcatagatacaccttgttggataatcaaggcagctccctcttgttcagaaaaagatggaaattatgcttgcctcctaagagaggatcaagggtggtattgtaaaaatgcaggatccactgtttactacccaaatgaaaaagactgcgaaacaagaggtgatcatgttttttgtgacacagcagcagggatcaatgttgctgagcaatcaagagaatgcaacatcaacatatctaccaccaactacccatgcaaagtcagcacaggaagacaccctatcagcatggttgcactatcacctctcggtgctttggtagcttgctacaaaggggttagctgctcgattggcagtaatcgggttggaataatcaaacaactacctaaaggctgctcata

SEQ ID NO: 234 - DNA, 449 bp, Human metapneumo virus
ataggggtctacggaagctccgtgatttacatggtccagctgccgatctttggtgtcatagatacaccttgttggataatcaaggcagctccctcttgttcagaaaaagatggaaattatgcttgcctcctaagagaggaccaagggtggtattgtaaaaatgcgggatccactgtttactacccaaatgaaaaagactgcgaaacaagaggtgatcatgttttttgtgacacagcagcagggatcaatgttgctgagcaatcaagagaatgcaacatcaacatatctacaaccaactacccatgcaaagtcagcacaggaagacaccctatcagcatggttgcactatcacctctcggtgctttggtagcttgctacaaaggggttagctgttcgattggcagtaatcgggttggaataatcaaacaactacctaaaggctgctcata

SEQ ID NO: 235 - DNA, 449 bp, Human metapneumo virus
ataggggtctacggaagctccgtgatttacatggtccagctaccgatctttggtgtcatagatacaccttgttggataatcaaggcagctccctcttgttcagaaaaagatggaaattatgcttgcctcctaagagaggatcaagggtggtattgtaaaaatgcaggatccactgtttactacccaaatgaaaaagactgcgaaacaagaggtgatcatgttttttgtgacacagctgcagggatcaatgttgctgagcaatcaagagaatgcaacatcaacatatccacaaccaactacccatgcaaagtcagcacaggaagacaccctatcagcatggttgcactgtcacctctcggcgctttggtagcttgctacaaaggggttagctgttcgattggcagtaatcgggttggaataatcaaacaactacctaaaggctgctcata

SEQ ID NO: 236 - DNA, 449 bp, Human metapneumo virus
ataggggtctacggaagctccgtgatttacatggtccagctgccgatctttggtgtcatagatacaccttgttggataatcaaggcagctccctcttgttcagaaaaagatggaaattatgcttgcctcctaagagaggatcaagggtggtattgtaaaaatgcaggatccactgtttactacccaaatgaaaaagactgcgaaacaagaggtgatcatgttttttgtgacacagcagcagggatcaatgttgctgagcaatcaagagaatgcaacatcaacatatctactaccaactacccatgcaaagtcagcacaggaagacaccctatcagcatggttgcactatcacctctcggtgctttggtagcttgctacaaaggggttagctgttcgattggcagtaatcgggttggaataatcaaacaactacctaaaggctgctcata

SEQ ID NO: 237 - DNA, 449 bp, Human metapneumo virus
ataggggtctacggaagctccgtgatttacatggtccagctgccgatctttggtgtcatagatacaccttgttggataatcaaggcagctccctcttgttcagaaaaagatggaaattatgcttgcctcctaagagaggatcaagggtggtattgtaaaaatgcaggatccactgtttactacccaaatgaaaaagactgtgaaacaagaggtgatcatgttttttgtgacacagcagcagggatcaatgttgctgagcaatcaagagaatgcaacatcaacatatctacaaccaactacccatgcaaagtcagcacaggaagacaccctatcagcatggttgcactatcacctctcggtgctttggtagcttgctacaaaggggttagctgttcgattggcagtaatcgggttggaataatcaaacaactacctaaaggctgctcata

SEQ ID NO: 238 - DNA, 449 bp, Human metapneumo virus; identical to SEQ ID NO: 234

SEQ ID NO: 239 - DNA, 449 bp, Human metapneumo virus
ataggggtctacggaagctccgtgatttacatggtccagctgccgatctttggtgtcatagatacaccttgttggataatcaaggcagctccctcttgttcagaaaaagatggaaattatgcttgcctcctaagagaggatcaagggtggtattgtaaaaatgcaggatccactgtttactacccaaatgaaaaagactgcgaaacaagaggtgatcatgttttttgtgacacagcagcagggatcaatgttgctgagcaatcaagagaatgcaacatcaacatatctacaaccaactacccatgcaaagtcagcacaggaagacaccctatcagcatggttgcactatcacctctcggtgctttggtagcttgctacaaaggggttagctgttcgattggcagtaatcgggttggaataatcaaacaactacctaaaggctgctcata

SEQ ID NO: 240 - DNA, 449 bp, Human metapneumo virus; identical to SEQ ID NO: 237

SEQ ID NO: 241 - DNA, 449 bp, Human metapneumo virus
ataggggtctacggaagctccgtgatttacatggtccagctgccgatctttggtgtcatagatacaccttgttggataatcaaggcagctccctcttgttcagaaaaagatggaaattatgcttgcctcctaagagaggatcaagggtggtattgtaaaaatgcaggatccactgtttactacccaaatgaaaaagactgcgaaacaagaggtgatcatgttttttgtgacacagctgcagggatcaatgttgctgagcaatcaagagaatgcaacatcaacatatctacaaccaactacccatgcaaagtcagcacaggaagacaccctatcagcatggttgcactatcacctctcggtgctttggtagcttgctacaaaggggttagctgttcaattggcagtaatcgggttggaataatcaaacaactacctaaaggctgctcata

SEQ ID NO: 242 - DNA, 449 bp, Human metapneumo virus; identical to SEQ ID NO: 241

SEQ ID NO: 243 - DNA, 449 bp, Human metapneumo virus
ataggggtctacggaagctccgtgatttacatggtccagctgccgatctttggtgtcatagatacaccttgttggataatcaaggcagctccctcttgttcagaaaaagatggaaattatgcttgcctcctaagagaggatcaagggtggtattgtaaaaatgcaggatccactgtttactacccaaatgaaaaagactgcgaaacaagaggtgatcatgttttttgtgacacagctgcagggatcaatgttgctgagcaatcaagagaatgcaacatcaacatatctacaaccaactacccatgcaaagtcagcacaggaagacaccctatcagcatggttgcactatcacctctcggtgctttggtagcttgctacaagggggttagctgttcgattggcagtaatcgggttggaataatcaaacaactacctaaaggctgctcata

SEQ ID NO: 244 - DNA, 449 bp, Human metapneumo virus
ataggggtctacggaagctctgtgatttacatggtccagctgccgatctttggtgtcatagatacaccttgttggataatcaaggcagctccctcttgttcagaaaaagatggaaattatgcttgcctcctaagagaggatcaagggtggtattgtaaaaatgcaggatccactgtttactacccaaatgaaaaagactgcgaaacaagaggtgatcatgttttttgtgacacagctgcagggatcaatgttgctgagcaatcaagagaatgcaacatcaacatatccacaaccaactacccatgcaaagtcagcacaggaagacaccctatcagcatggttgcactgtcacctctcggcgctttggtagcttgctacaaaggggttagctgttcgattggcagtaatcgggttggaataatcaaacaactacctaaaggctgctcata

SEQ ID NO: 245 - DNA, 449 bp, Human metapneumo virus
ataggggtctacggaagctctgtgatttacatggtccagctgccgatctttggtgtcatagatacaccttgttggataatcaaggcagctccctcttgttcagaaaaagatggaaattatgcttgcctcctaagagaggatcaagggtggtattgtaaaaatgcaggatccactgtttactacccaaatgaaaaagactgcgaaacaagaggtgatcatgttttttgtgacacagcagcagggatcaacgttgctgagcaatcaagagaatgcaacatcaacatatctaccaccaactatccgtgcaaagtcagcacaggaagacaccctatcagcatggttgcactatcacctctcggtgctttggtagcttgctacaaaggggttagctgctcgattggcagtaatcgggttggaataatcaaacaactacctaaaggctgctcata

SEQ ID NO: 246 - DNA, 449 bp, Human metapneumo virus; identical to SEQ ID NO: 241

SEQ ID NO: 247 - DNA, 449 bp, Human metapneumo virus; identical to SEQ ID NO: 239

SEQ ID NO: 248 - protein, 149 aa, Human metapneumo virus
IGVYGSSVIYMVQLPIFGVIDTPCWIVKAAPSCSGKKGNYACLLREDQGWYCQNAGSTVYYPNEKDCETRGDHVFCDTAAGINVAEQSKECNINISTTNYPCKVSTGRHPISMVALSPLGALVACYKGVSCSIGSNRVGIIKQLNKGCS

SEQ ID NO: 249 - protein, 149 aa, Human metapneumo virus
IGVYGSSVIYMVQLPIFGVIDTPCWIVKAAPSCSEKKGNYACLLREDQGWYCQNAGSTVYYPNEKDCETRGDHVFCDTAAGINVAEQSKECNINISTTNYPCKVSTGRHPISMVALSPLGALVACYKGVSCSIGSNRVGIIKQLNKGCS

SEQ ID NO: 250 - protein, 149 aa, Human metapneumo virus; identical to SEQ ID NO: 249

SEQ ID NO: 251 - protein, 149 aa, Human metapneumo virus; identical to SEQ ID NO: 249

SEQ ID NO: 252 - protein, 149 aa, Human metapneumo virus; identical to SEQ ID NO: 249

SEQ ID NO: 253 - protein, 149 aa, Human metapneumo virus; identical to SEQ ID NO: 249

SEQ ID NO: 254 - protein, 149 aa, Human metapneumo virus; identical to SEQ ID NO: 249

SEQ ID NO: 255 - protein, 149 aa, Human metapneumo virus; identical to SEQ ID NO: 249

SEQ ID NO: 256 - protein, 149 aa, Human metapneumo virus; identical to SEQ ID NO: 249

SEQ ID NO: 257 - protein, 149 aa, Human metapneumo virus; identical to SEQ ID NO: 249

SEQ ID NO: 258 - protein, 149 aa, Human metapneumo virus; identical to SEQ ID NO: 249

SEQ ID NO: 259 - protein, 149 aa, Human metapneumo virus; identical to SEQ ID NO: 249

SEQ ID NO: 260 - protein, 149 aa, Human metapneumo virus; identical to SEQ ID NO: 249

SEQ ID NO: 261 - protein, 149 aa, Human metapneumo virus
IGVYGSSVIYMVQLPIFGVIDTPCWIVKAAPSCSEKKGNYACLLREDQRWYCQNAGSTVYYPNEKDCETRGDHVFCDTAAGINVAEQSKECNINISTTNYPCKVSTGRHPISMVALSPLGALVACYKGVSCSIGSNRVGIIKQLNKGCS

SEQ ID NO: 262 - protein, 149 aa, Human metapneumo virus; identical to SEQ ID NO: 249

SEQ ID NO: 263 - protein, 149 aa, Human metapneumo virus; identical to SEQ ID NO: 249

SEQ ID NO: 264 - protein, 149 aa, Human metapneumo virus; identical to SEQ ID NO: 249

SEQ ID NO: 265 - protein, 149 aa, Human metapneumo virus; identical to SEQ ID NO: 249

SEQ ID NO: 266 - protein, 149 aa, Human metapneumo virus; identical to SEQ ID NO: 249

SEQ ID NO: 267 - protein, 149 aa, Human metapneumo virus; identical to SEQ ID NO: 249

SEQ ID NO: 268 - protein, 149 aa, Human metapneumo virus; identical to SEQ ID NO: 248

SEQ ID NO: 269 - protein, 149 aa, Human metapneumo virus; identical to SEQ ID NO: 248

SEQ ID NO: 270 - protein, 149 aa, Human metapneumo virus; identical to SEQ ID NO: 249

SEQ ID NO: 271 - protein, 149 aa, Human metapneumo virus; identical to SEQ ID NO: 249

SEQ ID NO: 272 - protein, 149 aa, Human metapneumo virus; identical to SEQ ID NO: 249

SEQ ID NO: 273 - protein, 149 aa, Human metapneumo virus; identical to SEQ ID NO: 249

SEQ ID NO: 274 - protein, 149 aa, Human metapneumo virus; identical to SEQ ID NO: 248

SEQ ID NO: 275 - protein, 149 aa, Human metapneumo virus; identical to SEQ ID NO: 249

SEQ ID NO: 276 - protein, 149 aa, Human metapneumo virus; identical to SEQ ID NO: 248

SEQ ID NO: 277 - protein, 149 aa, Human metapneumo virus; identical to SEQ ID NO: 249

SEQ ID NO: 278 - protein, 149 aa, Human metapneumo virus; identical to SEQ ID NO: 249

SEQ ID NO: 279 - protein, 149 aa, Human metapneumo virus
IGVYGSSVIYMVQLPIFGVIDTPCWIVKAAPSCSEKKGNYACLLREDQGWYCQNAGSTVYYPNEKDCETRGDHVFCDTVAGINVAEQSKECNINISTTNYPCKVSTGRHPISMVALSPLGALVACYKGVSCSIGSNRVGIIKQLNKGCS

SEQ ID NO: 280 - protein, 149 aa, Human metapneumo virus; identical to SEQ ID NO: 249

SEQ ID NO: 281 - protein, 149 aa, Human metapneumo virus; identical to SEQ ID NO: 249

SEQ ID NO: 282 - protein, 149 aa, Human metapneumo virus; identical to SEQ ID NO: 249

SEQ ID NO: 283 - protein, 149 aa, Human metapneumo virus; identical to SEQ ID NO: 249

SEQ ID NO: 284 - protein, 149 aa, Human metapneumo virus; identical to SEQ ID NO: 249

SEQ ID NO: 285 - protein, 149 aa, Human metapneumo virus; identical to SEQ ID NO: 249

SEQ ID NO: 286 - protein, 149 aa, Human metapneumo virus; identical to SEQ ID NO: 249

SEQ ID NO: 287 - protein, 149 aa, Human metapneumo virus; identical to SEQ ID NO: 249

SEQ ID NO: 288 - protein, 149 aa, Human metapneumo virus; identical to SEQ ID NO: 249

SEQ ID NO: 289 - protein, 149 aa, Human metapneumo virus; identical to SEQ ID NO: 249

SEQ ID NO: 290 - protein, 149 aa, Human metapneumo virus; identical to SEQ ID NO: 249

SEQ ID NO: 291 - protein, 149 aa, Human metapneumo virus; identical to SEQ ID NO: 249

SEQ ID NO: 292 - protein, 149 aa, Human metapneumo virus
IGVYGSSVIYMVQLPIFGVIDTPCWIIKAAPSCSEKNGNYACLLREDQGWYCKNAGSTVYYPNEKDCETRGDHVFCDTAAGINVAEQSRECNINISTTNYPCKVSTGRHPISMVALSPLGALVACYKGVSCSIGSNRVGIIKQLPKGCS

SEQ ID NO: 293 - protein, 149 aa, Human metapneumo virus
IGVYGSSVIYMVQLPIFGVIDTPCWIIKAAPSCSEKNGNYACLLREDQGWYCKNAGSTVYYPNEKDCETRGDHVFCDTAAGINVAEQSRECNINISTTNYPCKVSTGRHPISMVALSPLGALVACYKGVSCSIGSNWVGIIKQLPKGCS

SEQ ID NO: 294 - protein, 149 aa, Human metapneumo virus; identical to SEQ ID NO: 292

SEQ ID NO: 295 - protein, 149 aa, Human metapneumo virus; identical to SEQ ID NO: 292

SEQ ID NO: 296 - protein, 149 aa, Human metapneumo virus; identical to SEQ ID NO: 292

SEQ ID NO: 297 - protein, 149 aa, Human metapneumo virus; identical to SEQ ID NO: 292

SEQ ID NO: 298 - protein, 149 aa, Human metapneumo virus; identical to SEQ ID NO: 292

SEQ ID NO: 299 - protein, 149 aa, Human metapneumo virus
IGVYGSSVIYMVQLPIFGVIDTPCWIIKAAPSCSEKNGNYACLLREDQGWYCKNAGSTVYYPNEKDCETRGDHVFCDTAAGINVAEQSRECNINISTTNYPCKVSTGRHSISMVALSPLGALVACYKGVSCSIGSNRVGIIKQLPKGCS

SEQ ID NO: 300 - protein, 149 aa, Human metapneumo virus; identical to SEQ ID NO: 292

SEQ ID NO: 301 - protein, 149 aa, Human metapneumo virus; identical to SEQ ID NO: 292

SEQ ID NO: 302 - protein, 149 aa, Human metapneumo virus; identical to SEQ ID NO: 292

SEQ ID NO: 303 - protein, 149 aa, Human metapneumo virus; identical to SEQ ID NO: 292

SEQ ID NO: 304 - protein, 149 aa, Human metapneumo virus; identical to SEQ ID NO: 292

SEQ ID NO: 305 - protein, 149 aa, Human metapneumo virus; identical to SEQ ID NO: 292

SEQ ID NO: 306 - protein, 149 aa, Human metapneumo virus; identical to SEQ ID NO: 292

SEQ ID NO: 307 - protein, 149 aa, Human metapneumo virus; identical to SEQ ID NO: 292

SEQ ID NO: 308 - protein, 149 aa, Human metapneumo virus; identical to SEQ ID NO: 292

SEQ ID NO: 309 - protein, 149 aa, Human metapneumo virus; identical to SEQ ID NO: 292

SEQ ID NO: 310 - protein, 149 aa, Human metapneumo virus; identical to SEQ ID NO: 292

SEQ ID NO: 311 - protein, 149 aa, Human metapneumo virus
IGVYGSSVIYMVQLPIFGVIDTPCWIIKAAPSCSEKDGNYACLLREDQGWYCKNAGSTVYYPNEKDCETRGDHVFCDTAAGINVAEQSRECNINISTTNYPCKVSTGRHPISMVALSPLGALVACYKGVSCSIGSNRVGIIKQLPKGCS

SEQ ID NO: 312 - protein, 149 aa, Human metapneumo virus; identical to SEQ ID NO: 311

SEQ ID NO: 313 - protein, 149 aa, Human metapneumo virus; identical to SEQ ID NO: 311

SEQ ID NO: 314 - protein, 149 aa, Human metapneumo virus; identical to SEQ ID NO: 311

SEQ ID NO: 315 - protein, 149 aa, Human metapneumo virus; identical to SEQ ID NO: 311

SEQ ID NO: 316 - protein, 149 aa, Human metapneumo virus; identical to SEQ ID NO: 311

SEQ ID NO: 317 - protein, 149 aa, Human metapneumo virus; identical to SEQ ID NO: 311

SEQ ID NO: 318 - protein, 149 aa, Human metapneumo virus; identical to SEQ ID NO: 311

SEQ ID NO: 319 - protein, 149 aa, Human metapneumo virus; identical to SEQ ID NO: 311

SEQ ID NO: 320 - protein, 149 aa, Human metapneumo virus; identical to SEQ ID NO: 311

SEQ ID NO: 321 - protein, 149 aa, Human metapneumo virus; identical to SEQ ID NO: 311

SEQ ID NO: 322 - protein, 149 aa, Human metapneumo virus; identical to SEQ ID NO: 311

SEQ ID NO: 323 - protein, 149 aa, Human metapneumo virus; identical to SEQ ID NO: 311

SEQ ID NO: 324 - protein, 149 aa, Human metapneumo virus; identical to SEQ ID NO: 311

SEQ ID NO: 325 - protein, 149 aa, Human metapneumo virus; identical to SEQ ID NO: 311

SEQ ID NO: 326 - protein, 149 aa, Human metapneumo virus; identical to SEQ ID NO: 311

SEQ ID NO: 327 - protein, 149 aa, Human metapneumo virus; identical to SEQ ID NO: 311

What is claimed is:

1. A chimeric bovine parainfluenza virus type 3 comprising a heterologous nucleotide sequence encoding a metapneumovirus polypeptide.

2. A chimeric human parainfluenza virus type 3 comprising a heterologous nucleotide sequence encoding a metapneumovirus polypeptide.

3. A chimeric bovine parainfluenza virus type 3/human parainfluenza virus type 3 comprising a heterologous nucleotide sequence encoding a metapneumovirus polypeptide.

4. The virus of claim 1, 2, or 3, wherein said virus comprises heterologous nucleotide sequences derived from the same gene of a metapneumovirus.

5. The virus of claim 1, 2, or 3, wherein said virus comprises heterologous nucleotide sequences derived from at least two different genes of a metapneumovirus.

6. The virus of claim 1, 2, or 3, wherein one or more of the open reading frames in the genome of the virus have been replaced by an ORF which encodes one or more of (i) an avian pneumovirus (APV) F protein; (ii) an APV G protein; (iii) an APV SH protein; (iv) an APV N protein; (v) an APV P protein; (vi) an APV M2 protein; (vii) an APV M2-1 protein; (viii) an APV M2-2 protein; or (ix) an APV L protein.

7. The virus of claim 1, 2, or 3, wherein one or more of the open reading frames in the genome of virus have been replaced by an ORF which encodes one or more of (i) a mammalian metapneumovirus (MPV) F protein; (ii) a mammalian MPV G protein; (iii) a mammalian MPV SH protein; (iv) a mammalian MPV N protein; (v) a mammalian MPV P protein; (vi) a mammalian MPV M2 protein; (vii) a mammalian MPV M2-1 protein; (viii) a mammalian MPV M2-2 protein; or (ix) a mammalian MPV L protein.

8. The virus of claim 6, wherein the avian pneumovirus is APV type A, APV type B, APV type C, or APV type D.

9. The virus of claim 7, wherein the mammalian MPV is variant A1, variant A2, variant B1, or variant B2.

10. The virus of claim 1, 2, or 3, wherein said heterologous nucleotide sequence is added to the complete genome of said virus.

11. The virus of claim 1, 2, or 3, wherein said nucleotide sequence is added at a nucleotide position of the parainfluenza virus genome of 104, 1774, and 3724.

12. The virus of claim 1, 2, or 3, wherein a nucleotide sequence of said parainfluenza virus has been substituted by said heterologous nucleotide sequence.

13. The virus of claim 1, 2, or 3, wherein the heterologous sequences are inserted into the genome of said parainfluenza virus, wherein the genome has been deleted of one or more genes.

14. The virus of claim 1, wherein said bovine parainfluenza virus is a Kansas-strain bovine parainfluenza virus type 3.

15. The virus of claim 1, 2, or 3, wherein said heterologous nucleotide sequence is derived from the nucleotide sequences encoding a F protein, a G protein or a fragment thereof.

16. The virus of claim 15, wherein said F protein comprises an ectodomain of a F protein of a metapneumovirus, a transmembrane domain of a F protein of a parainfluenza virus, and luminal domain of a F protein of a parainfluenza virus.

17. The virus of claim 1, 2, or 3, wherein said nucleotide sequence is SEQ ID Nos: 1 to 5, 14, or 15.

18. The virus of claim 1, 2, or 3, wherein said nucleotide sequence encodes a protein of SEQ ID Nos: 6 to 13, 16, or 17.

19. The virus of claim 1, 2, or 3, wherein said virus further comprises a heterologous nucleotide sequence derived from a respiratory syncytial virus or a mutated form of respiratory syncytial virus.

20. The virus of claim 19, wherein the respiratory syncytial virus is a respiratory syncytial virus type A, a respiratory syncytial virus type B, a bovine respiratory syncytial virus, or an ovine respiratory syncytial virus.

21. The virus of claim 19, wherein said sequence is derived from the nucleotide sequences encoding a F protein, a G protein or a fragment thereof of said respiratory syncytial virus.

22. The chimeric parainfluenza virus of claim 1, 2, or 3, wherein the genome of said virus contains mutations or modifications, in addition to said heterologous nucleotide sequences, which result in a chimeric virus having a phenotype more suitable for use in vaccine formulations such as an attenuated phenotype or a phenotype with enhanced antigenicity.

23. The chimeric parainfluenza virus of claim 1, 2, or 3, wherein the intergenic region of said heterologous nucleotide sequence is altered.

24. The chimeric parainfluenza virus of claim 1, 2, or 3, wherein said heterologous nucleotide sequence is added at a position of the parainfluenza virus genome selected from the group consisting of position 1, 2, 3, 4, 5, and 6, and wherein the intergenic region of said heterologous nucleotide sequence is altered.

25. A recombinant DNA or RNA molecule encoding the genome of the virus of claim 1, 2, or 3.

26. A recombinant DNA or RNA molecule encoding the genome of the virus of claim 18.

27. A vaccine formulation comprising the chimeric virus of claim 1, 2, or 3, and a pharmaceutically acceptable excipient.

28. A vaccine formulation comprising the chimeric virus of claim 18 and a pharmaceutically acceptable excipient.

29. The vaccine formulation of claim 27, wherein said chimeric virus comprises a genomic modification or mutation which results in an attenuated phenotype or enhanced antigenicity.

30. The vaccine formulation of claim 29, wherein said modification or mutation is derived from a naturally occurring mutant.

31. The vaccine formulation of claim 27, wherein said vaccine is used to modulate the immune response of humans, primates, horses, cows, sheep, pigs, goats, dogs, cats, avian species or rodents.

32. The vaccine formulation of claim 30, wherein the vaccine is used to modulate the immune response of a human infant or a child.

33. An immunogenic formulation comprising the chimeric virus of claim 1, 2, or 3, and a pharmaceutically acceptable excipient.

34. An immunogenic formulation comprising the chimeric virus of claim 18 and a pharmaceutically acceptable excipient.

35. The immunogenic formulation of claim 33, wherein said chimeric virus comprises a genomic modification or mutation which results in an attenuated phenotype or enhanced antigenicity.

36. The immunogenic formulation of claim 35, wherein said modification or mutation is derived from a naturally occurring mutant.

37. The vaccine formulation of claim 33, wherein said vaccine is used to modulate the immune response of humans, primates, horses, cows, sheep, pigs, goats, dogs, cats, avian species or rodents.

38. The vaccine formulation of claim 36, wherein the vaccine is used to modulate the immune response of a human infant or a child.

39. A method for treating or preventing a respiratory tract infection in a mammal, said method comprising administering a vaccine of claim 27.

40. The method of claim 39, wherein the respiratory tract infection is a MPV infection.

41. The method of claim 39, wherein the respiratory tract infection is an infection with MPV, RSV, hPIV or a combination thereof.

42. The method of claim 39, wherein the subject is a human.

43. The method of claim 42, wherein the human subject is less than 5 years of age.

44. The method of claim 42, wherein the human subject is less than 2 years of age.

45. The method of claim 42, wherein the human subject suffers from a disease or a condition in addition to the respiratory tract infection.

46. The method of claim 45, wherein the disease or a condition is of cystic fibrosis, leukemia, non-Hodgkin lymphoma, asthma, and bone marrow transplantation and kidney transplantation.

47. The human subject of claim 42, wherein the human subject is an immunocompromised individual.

48. The human subject of claim 42, wherein the human subject is an elderly.
